United States Patent Application Publication US 2026/0058010 A1 - sequence listing, part 2

SEQ ID NO: 13 - DNA, 63746 bp, Homo sapiens
  source 1..63746: mol_type = genomic DNA
ctctgcccagggcaggcgtgggagggcagggggccgtagtgtgcagagccagggggccctggggtgcagagtcaaggggccgtagggtgcagagtcagggggccgtagggtgcagagtcgggggcgtagggtgcagagttagggggctgtaaggtgcagagtcagggggccatagggtgcagagtcagggggcatagggtgcagagtcaggggccctggggtgcagagtcgggggcgcagggtgcagagtcagggggcatagggtgaagagtcagggggccctggggtgcagagtcgggggcgcagggtgcagagtcagggggccatactgcagagtcagggaccgtagggtgcagagactgggggccatagggtgcagagtcagggggcccgggggtgcagagtcagggggcgtagggtgcagagtcagggggccctggggtgcagtcagggggcatagggtgcagagtcagggggccacagggtgcagagtcagggggccctggggtgcagagtcagggggccatggggtacagagtcggggggacctgggttgcagagtcggggggccctgggttgcagagtcagggggcagaggtgaagccacgccctgggatgtttgacctccctgtgccgaggaggtctccccgcagccccaggctcctctccaccagcagctcaccctgcactggggaatctttgagagcacagcttttcttcttctagagacaggatctcaccctctcacccaggctgagtgcagtggggcgatcacagctcactgcagcctcaacctcctgggctcaagagatcctcctacctcagcctccggagtagctgctaatagaggtagacacgaccacgcctggcgaatctttccatcttttattatgtaaacatggcgtcttgctatgttgcccaggctggcctagaactcctggactcaagtgatcctcccacctctgcctcccacagtgccgggatcacaggtgtgaggccctgcgcccgaccagaagctctgttctgacctcatttctctctctatctctgcccgctggcctttgaggctcggaggagctggccctgaggccctcaccactcactgactcgctggcgttcctcgtcactctgccctgggcccttcccacgacttctctcctctcctcttggttcctattcatctttcaaagccgcctcctccaggacaccctgcctgcttgctcctcccttcctttgcctcaggcgagtgcctgtccctggtgacttgagccacagctatttctgtgcctgtctctcctctggggccgcccacccggctcacatcctccgtgggacttcgcccatccgcacaggccagtcacctagtcacctattaggaggcccaaggagcaatttcagagatcaactcctccattgttctgcaatctcggatctgagtgaagacaccccagcctctaaggggggcgcagtggacccaggaaggggcacctgcccggcagatgcgaggccacgggaaccactcgcggctgaaatccagatgtgcttctctgggcaacgtccatcaccaccaggcacagatggcgcacggtgcacactgccgagggggccggacaccacagtcaccagacagccggggcccaaccgctgggggccacacccggggcagatggacgtaccggcccatcgaggccctcatcaacgtcagctttcccggagcaaaggtgctgctgggatctgtggcagcttcccccaggacccaagccccaaagcctgcgtgcagaggcccttccgaggtgaactcacaccaagaagcctcgcagccagggaggagagagcacaggagctggggggcttccagcacagagctgaaccctgtccctcctgctctccctccctctctccctccctccctttctctctgcctccctccctttctctctgcctccctccctttctctctccctccctccttttctctcttcctccctccctctccctccctctctccctctccctccctctctccctctctccctccttccctctctcccttcttccctccctccctccctccctttctcccctcctcgggcctccccactgttctgttgctcccccagggtcagactcagtcgcctgtggccccccagcctcacacaccctgagccctcagtagatgtcatgaaccagtgactttaaaatgaaccaactgactctcaccccaggggccaggcacagcggattccttagcctggctactgctattgctcagggtcactggctggctgtggctgagagtgtccagccacacactccttccccaggatgtggcctcccagctgggggtctaagggggctctggatcactggcagagggagggcagccctgggggcctcgggaagctgtggggtggagcacagggcagggcgatgcaggcctggccccagccctggagaaggagggactccacagctgctctctgggcagcagatgcccctgccagacgtcacatgcctccgggcacctcagggtgggagaacggccgagggcgagccctcatgggcgtgggtcttcagaagtggctatttgcagagacaggctcttcctgggcttcccgtctccacccgagtggctgcctgctggtggcaacaccatccaggcagggactcaggtgaggctggtggcgccaggggcctgcagatgaggcccttccaggagactggggcagccgtggggagagtgaggcccagacagcaccatgggcctgagaacgtcctcccaggccatagcctggaagcgggatgccggagattcctgctgaggaaggggcagaagcctggactccagagggccgcccacaggtgggacatctgcccggggaagggcctgcaggtcctggtgaccaaggacacccgggagcctcttcactggaggaagagtcggctcagggcggagcctggccacacaaaagcggcgtatcccccagggagcccgaggctgtgaccgggaggcctgcagctgccacggatgctgacggacctgcactcaccacaggaggtccggctggagggcgggtctgggcaggggccaccgggtctgtcctgcccgggggactgcctggccctgcctggtttgccccatcactggagcgccccagtttggatgccaagtgccgagctcgcacgggtgactctacctcgctgagaactgacgaaccgtaagtggtgcattcacagaattcacacatcaagctttttaatttcatttccaatttaatatcatctatctcagtctgtttctcctgtaacacagtctttaaagttaagtgggcgcgacccacttaactgttcccaccccttccggcacggcaccggcaccgtcctgggcgcccctcagggttcttgggacctggatttattgacctgctcagagaggagcccagcggccgtgcagatgggaaggcagctgctcagaaaacagggcgtctttatttgttcccgactttcctaggcaacaaattaccagaggccgccgactcgtttggggaaattgcttctgggaacagtgttatttttacctccgtcttgcaatcctctcacccacctggcaccccaccgcccagcgcacgcaagccaagtcccggagctgccatgctcgtctgtgaggaaacgctggagctgggtgcccagggctgctgggggtccacgagcccccggggccaggccgtgagcttggtcggtgggcccacggccggaggctccaggctggtgaggaccctgggcagcaggagcccccattgccttctgggatctgggctgatgctgcaacgctggcccggtggccccaggtggccttacggcctcaaggacaagtgggtgccagagcccaggtctccctggaggtcccagttacagaggagtcgccgagaccaacggcagggccttcacccacaccccgtgcaggcatttgttcacaggtccccctgctagtcctgataaagggcgacgtgtgtgcacacgcgtgcacggtgtgtgagtaaagtggcagaaagagtgtcatgaggcggtgacgctaccgtccccacagccagcctcatctcactgacgcctccctgtacgcattgctaaaagataacagctgtgatttcttcaaaaattagcaataaaattcctgtttgatcaagtattaagcctaggttcccattttctgggttttcttacactttgtacaatttatttgtaaaatcaggaccagcacaggccccaggtgtggctggctgatgtcccgccctccgtctggacctgccggcctctgccagccgcctttgtctccccgaatactctttgctgaagaaacgccggccggcatcctccggccaaagttccccctgtggactcaggggtggtgcccacggtgttgtttacagggtcttgtggccccttgtcttttttttttttttttttttccttttttaaaagaccaggtctcactctgttgccctggctggagtgcagtcgcgtgatctcagctcaccgcagcctcaacctcccgggctcaggtgatcctcccgcttcggcctcctgagtagctgtgattacaggcacacaccaccacactcagctacatttggtatttgtggtggagatgggctttcgccatgttgcccaggctggtctcgaactcctgagctctaaagatcctcttacctcggacccccaaagtgctgggattacagcgtgagccaccatgcccagcccctgcgtgtcttacaaggttgtggctgtgtctgaggtactgaccgcccagaggtggtggagtctctcttcccacaatggctgttgccaagtccactgacccagcaggggtcagaaggccaatcccctcatctctttttctttcagtggccctgtagacgcctgcacaggtccccctggtccgtggtcactgtagacgcctgcatgatcccccgtggtctggggtccctgtagacacctgcacagcccccccggtccatggtccctgtagacgcctgcatgatacccctggtccatggtccctgtagacgtctgcatgatcccccgtggtctgccgtccctgtagacacctgcacaggaccccatggtccgtggtccctgtagacacctgcatgatcccccatggtccgtggtccctgtagacacctacacaggcccccatggtccgtggtccctgtagacgcctgcacaatcccgcgtggtcagtggctccagagtcctcccgagatgatgtcagcagcagtggcccggatttctggtgctgctggcccccggccccgacacactcttcctgatccagctgggcatcaccattgtgcacactcttcctgatccagctgggcatcaccattgtgcccagggctccttgcaggggctgtgggctttagagaccacagagtgtttgcccagagtgttcactgagactgggctattcattgtttaactgggcaaactaggagtgaggagtgtggtggggaccacaggtgccagcagcccgtggggaccttggctcagggtgaagctgggagtcggtctgaggatgcagacctaggacccggccatgcactcagaagcagccgcccctcaggaacctcccttccgatctctgtcatgagctccctgggggtggagcagaggctcctgctcttcacagggccaccgcagaagcctcaggccccagccctggcctgtggtcacagcagggaacagccacaggccccgagctctgcagcccacagcaccccctgccgaggcccagcagctgacctctgtgacctctgtgccgaggcttggctgacagcaccatgtccagccctgctgaggcttccgtctaaactccgcagagcacacagccccttcacctcccacacagcacagcccagtcagggagccccaagtccacacaggaaccagccattttctccaggcgagcacccttgctgggcaggtaggagagggcagagtggcggtggcagggccgccccaggccacgccaagctgcatggagggaggagcaggcccagccaggagcggtcgcagtccctgtccacctggcaggcaagctggggtcacgtgaaatcacacgtgggcgccctcggtcaggaagacagcacccacgggccaagcagcgagcgtgtttccctgcagcattgccctgggaggagtggacgctcaggtctggtccaggaagcagctggggctggggcggcccacgggcagcagggctggcaggaggctggggcctggtccttgtgtccttcctgctggccacacacccactacctgggtcctgtggccctcggggtgtcctgggcatggcacaaccagcgtggggagatactgctaaacctactgactctttgaggagtgaaaacggagggcagagatttgggggaggaattttaaagtcaacttgaaagactggcttagtggatctggctgagtccaaattgcatttggagaaaattgctgtgtcaggaatctttttttaacctgcggatgaggaagtcttgttttatccgtagtttaggagtgacagggttgcgctgtgtgataaggtgagtgcaatgctggctcctcatgccccagtgggggacccctggcatccgtggggccacaggcagggtcctctgggggtggcccacacgggaagatgctgccttttctccaccgagggctgcgcctgcccctcactcccccagcatcacaggccagaggtctgggactggcctggacaccactcctgacgtcctgggcagccttggacccttcttcccccaccttgggcaccctcagggcaaggcacaggtgaggggcaaataggagcagaccacccacagcgtggatcctgcagatgcaggcacagtgggccacagggtccaggaggaggacgcagcaatgcggggtgcgtgggctatgggccgggagcaggatctgagcaggatccaccacctccgagggacacgggggcacctcaccccctctcagccctgtccctgcacctcactcacccctctgggtcctcctgcccacagcccttgcagggcacgtgaaaccggtcactgtggaccggccttcgcctccggctctgcctctgcctcacgcctcgtcctgcgagtctcacgccagctgctctgtggctatgatgatggctgagcatatggacgcactggtcaaatatttggagtttgtgaactatattttgaaattaatgaggattttggctttcatagacttccaaaatatataaacatgccagcttctggggaggatgtgatccacctgaaaccaaccccttgtcagcagggtgtttgctcctgggtggcgcctttaggagccgagggtgccgggctctgcggccgcatgtgctggtgcccgtgtctcaggctctgcgggttcccctgcctcctgggtgatgatgtggttcccaaactctccgcatcttccagggaggatgcctgcgctgccgtggccacctgcccagcccagatggagccgtcgtgctcaacaccaagccccagggcccctgacctggtctccccgtctctgtggcaccagctgctacccacagatgcagtcggttcaagtgcttatcaccccccagagcaattcttgagagcagggcctcccggtggtgtaccccccacccagcccagcccaggaaggtccacttgctgcttgtacgggagccttgtttggggagaggggcttgtgaggctctgacgaatgccctcgaggccccgggcacacaccgcaaccatctgtccatggctctgcgagccactggcttctcccctttccacaatgcagggagtggtccccacggagggcgtgagtccctgcccccacttcaggtattagcttgttctgggcttcggctattaccaacagctcaaagcaggaatcactggctcaaagattattataaatttttaaataaaaagattatttttaggctcaaagatattttgaaaggagagaaagcaatgtcttaagacacaaagaactgaaaaactgccctacggtgtgtgaaaaactgccccgtggcgtgtgagaaactgccccgcggcgtgtgagaaactgcccctcggcgtgtgagaaactgccccgcggtgtgtgtgtgagaaactgccccgcggcgtgtgagaaactgccccacggtgtgtgagaaactgccccgcggtgtgtgtgtgagaaactgccccgcggcgtgtgagaaactgcccctcggcgtgtgtgtgagaaactgccccgcggtgtgtgagaaactgcccctcggcgtgtgtgtgagaaactgccccgcggcgtgtgagaaactgccccttggcgtgtgtgtgagaaactgccccgcagcgtgtgagaaactgccccttggcgtgtgagaaactgcccctcggcgtgtgtgtgagaaactgccccgcggcgtgtgtgtgagaaactgccccgcggtgtgtgagaaactgccctgcggtgtgtgagaaactgcccctcggcgtgtgagaaactgccccgcggcgtgtgagaaactgcccctcggcgtgtgagaaactgccccttggcgtgtgtgtgagaaactgccccgcggcgtgtgtgtgagaaactgccccttggcgtgtgagaaactgcccctcggcgtgtgtgtgagaaactgccccgcggcgtgtgtgtgagaaactgccccgcggtgtgtgagaaactgccccgcggtgtgtgagaaactgccccacggtgtgtgagaaactgccccttggcgtgtgtgtgagaaactgccccttggcgtgtgtgtgagaaactgccccgcggcgtgtgtgtgagaaactgccccttggcgtgtgagaaactgccccttggcgtgtgtgtgagaaactgccccgcggcgtgtgtgtgagaaactgcccctcggcgtgtgtgtgagaaactgccccttggcgtgtgtgtgagaaactgccccttggcgtgtgtgtgagaaactgccccgcggcgtgtgtgtgagaaactgccccgcggtgtgtgagaaactgccccgcggtgtgtgagaaactgcccctcggcgtgtgagaaactgccccgcggcgtgtgagaaactgccccgcggcgtgtgtgtgagaaactgccccgcggcgtgtgagaaactgccccgcggtgtgtgagaaactgtcccgcggtgtgtgagaaactgtcccgcggtgtgtgagaaactgccccgcggcgtgcgtgtgagaaactgccccgcggcgtgtgagaaactgccccgcggcgtgtgtgtgagaaactgccccgcggcgtgtgagaaactgccccgcggtgtgtgagaaactgtcccgcggtgtgtgagaaactgtcccgcggtgtgtgagaaactgccccgcggcgtgcgtgtgagaaactgccccgcggcgtgggtgtgagaaactgccccgcggcgtgtgtgtgagaaactgccccttggcgtgtgtgtgagaaactgccccttggcgtgtgtgtgagaaactgccccgcggcgtgtgtgtgagaaactgccccttggcgtgtgtgtgagaaactgccccgcggcgtgtgtgtgagaaactgcccctcggcgtgtgtgtgagaaactgcccctcggcgtgtgtgtgagaaactgcccctcggcgtgtgtgtgagaaactgccccgcggagtgtgtgtgagaaactgccccgcggcgtgtgagaaactgcccctcggcgtgtgagaaactgcccctcggcgtgtgagaaactgccccgcggcgtgtgtgtgagaaactgccccgcggcgtgtgagaaactgccccgcggtgtgtgagaaactgtcccgcggtgtgtgagaaactgccccgcggcgtgcgtgtgagaaactgccccgcggcgtgggtgtgagaaactgccccgcggcgtgtgagaaactgcccctcggcgtgtgagaaactgccccgcggcgtgtgtgtgagaaactgccccgcggcgtgtgagaaactgccctgcggtgtgtgagaaactgtcccgcggtgtgtgagaaactgccccgcggcgtgcgtgtgagaaactgccccgcggcgtgtgagaaactgccccttggcgtgtgagaaactgcccctcggcgtgtgtgtgagaaactgccccgcggcgtgtgtgtgagaaactgccccgcggcgtgtgagaaactgccccgcggtgtgtgagaaactgcccctcggcgtgtgagaaactgccccgcggcgtgtgtgtgagaaactgccccgcggcgtgtgtgtgagaaactgccccacggtgtgtgagaaactgccccgcggcgtgtgagaaactgccccgcggcgtgtgtgtgagaaactgccccgcggcgtgtgtgtgagaaactgccccgcggcgtgtgtgtgagaaactgccccgtggcgtgagagaaactgccccgcagcgtgagacacactgccccgcggtgtgccaaaactgctaatcctagaaaaaccagcgactcaggaatattaattttcaaacaaataattattttaacaaaattgccaggtggaacgacttgcttccgaccacatctaatttggtaaaattgctttggcccggttgccagaagccttggcaggaaccaggctgaggcagctgggccagccacggagggcagcgcagccgacccaggcagggccgggcagcaccaggcggcaggtgtgatcagacggagcgggtcccacggaagggcgggggcttgagctggacaaaggctgggccagtgggtgggcaggacctcaggtaccaggtctactccaggcagcaccagggacagctcccaagccgctgccggctctggtccccagggaggggctggctgcaccatgggcctgctcatggccctccaggccagacgccccagggacggcacctgggctgaccctcgaagatgctccagggctgtgggtaaggcagggaaggcttcatgaatgtcaggacagtgaggccccgtgggtgagccggaggcaggcgagggtgtggtcgggagggaacgcgtgcttgatccctccttggtggtacggagacaggattgtggggccgcctgcttcctcctcactggacccgccctcttgcctaagcaggaccccgaggggtgcggtgggggctggatccccgtccttcttgtgaccacggcccagggatggctggccagacggggatggcgtcccagccctgacagagcagggacaggaccaagaaaggccccagagccacccccactcctgggaagaccccaacgatggacttggccctggagggaccaccaggctccaagaggcagctcctgacccccaggatggaggcttttgtgaaaaccaggtcatgtggctgattattcaggtctggaaaccggaatagtcccaaaaatgtaaaaccatctggacatttggctgtttctgtttcagcctttatcccacgttgagatcagggtagacctgggagacagctgtgcaggcagcagcactctgatacagggaagccggagccgcggacctgtcccacgttgagatcagggtagacctgggagccagctgtgcaggcagcagcactctgatacagggaagccggagccgcggacctgtcccacgttgagatcagggtagacctgggagccagctgggcgggacgcactgctctgatacagggaagctggagcctcggacctgtcccaggttgagatcagggtagatggtcttggagccagctgggcgggatgcgccgctctgatgaagggaagccagagccttggacctagatgtaaaagctctgtgttcacaaatcttcccggggacccacattaacttccgagtcgggaaggaatcatctgcatgaaatcgggggtttcacggtgctcccgcatcttggcgaagatggcgtttggtggccgtgggcttcaccgtctgaattcatggacgttaacgggcaggagcgcatgcatgtcgctgttaagatcggcagtgtggctctgtggttccctgtgatgagccctcattacaattccgggctgcatgtggtggtttctgtggcagagtttataagtgtcctcgccccacgtctgtggccgggtgcccaggccacgtgtcagccctgggaggggtggacagagactcacatcgaacactcgtgagcctgcctggagcagccacagtgcttggggtgcaccgaaggggagccctccttggtctgctgaaccctgactccttgtagagggctcgggcctcaccagggctgcccttgtgagtccagggccatcgggggtggaggaggacaccaggagggaaggctgcgtgcttgtgggctcctggaggtcgtccacccacagaagccgtgttctgattatcaacacgccctctggcaggaccccctggagccagggctccctcggcagcaccgggcgctacaaccagacccgggcaccaggcagccagcagcaggggctgtgctcggatgcagctctacacgaggattttgtgccgggtgcagccactggctggcggggacactgtgggttcccaactactgtggcctggccacatccgctcccctcccccactcaagtgtccagacagaggctggtggagctcctgggctgcagaggatttatccatcaatgcgcagctgaggacgtcggaaagccatgtctggggtggggcctgtggggcctcggggagaacgggtgaaggcatgtcacccccagtgtgtgagcaaagctacagcatagccattgccccaacagccaagtgcactcctgcccctcacagcccctgcccccgacacctgcctggctccctggcctgcagaatgagcagaatcccacacccatccagccctccccacctgatcccagacttccccaggtgctctctgcctgggtcccgggtgggctcagtgagagaggaggccacgtggatcctctgtggccaccggcaggagccaacaggagctgtgggggccccaggccacaccggggaccccagaaccttgtaggatcggggctttgcatagggcctcccttcccgtgaacacccactcagagcctactcctgccttctttcaataccctccacaagccttcagcaaaaccaaggttcgcgacttggggaggggaggcctttatgccttttccaaggaggagaaggtatctgaggcccagcgggtagaggcctacgagacccacggccttggcctgaggtgggcataggatgctgagacagagcacatccctcacacagccggacccctgacacgcagagtccgccccacagtacaggccgacagaaccctgtgccgtccccctgtaagcctggatgcgtgtgccagggccttgcgctggacgcagaggcctggccgaggcaccctggacgcaggccctgtgcggtgaggccttccaacgtaaaacccacccaaggggctcattctgcaggggggcccacaagcgccaaagggcctgtttgccacacgtggtggtcagtgggagccacgtgagcttccccgggggcctcccgcctcagaggagggagactgtgctggccctgtgtcctctcgggggctctgctgagtgcttattaaagaggcggcagcagtgaggagattttaggtttgttaattttattatttggttctcaaacgaggcttcacctcagggtaagcacgaatctgttggcttgaatcttggctaggaatggtctgcacaaattcaaactgacgctggggggagacggctggttgccgtggcaaccagagagccgtttttaattccgcacggtgagtggcggctgctgccgctgtctcgggaggacggtggccctgggtcccgcgcgctctgcggccaggctgcccgctccccggaggccgccatttcccctctcggcgggcttctaagttcaggctctcagagtctccaccaaatggctggaaacgaacaaacgcaaagatctcgaaagtgttccaaaaagaggcaggtcctgcccgagatgccagtggcgtgaggccactgttgctccagagctccgtatttacagcaagctcctcacgcgagtccccggcagccacggcccctccaaactcggggctggggaggggctcaccctggcgagggaagacggggctgggggctcacccctggcgagggaaggcacccatcagcgtcctgagcctcaggcgtcggcctgacctccaactctgttaacctgcatgaggcagcgtcatctctgggactgtttcccgttctcccacaaacagcctgcagaacccaaagccacaagatgcagagaaacgtggtcccctggctgaggccttgcaggcaacacggcccactctctctgggtaggggcgggcccatcccccattgttccttccctacggaggcagcagccgcagctcaggccccaagggggactgtggcaggagcaggcggccacccacgggcgccccacatctcgtgtccatcaggacgtcccctcagagggaggaagcccacatccactactaagagggctgaaggctcctggcgggaggcaagtcttcggccatggccccagcatttcggaggaggtcccagtggcctgcccagttaatgaggccaggtggcggcctggcccctcccagaatagaaccccaaactgacctttccagaagggaggaagaatcgcagagcagtgggaagggctggggggtcccatgcacccgagaccctgtgagcctgggcctcgggtgccaaataaacaacaaagccctcgagagtcgcgcgcctcaggagtggggctctcgttgctgtcgggcggcgtccagcagctgtttctttggaaggtcagtgttgaaggcgttaggatttgcgtcaggaagaactgctcccacccccctgtgccaggcccacctccaccaaggccagctgggctgtgttcagactgcccggccctccacaaacccctccgcaaacccagccatttcttttgagaacatctttcctcccacagtgaggcaggagccacatgcctgcttccgtgtggactgtgagctgtgtgttcttacagttttaaaccatcagaaaaagtcaaaagaagaataacccttcgtggcacgtccatggatgacgcttcgtggcacacaggcccacccctcgctggtgtgctacctgcagtgccgaagccagcaggaggctgccctgatggagaacgtggctggaggggctgcggtggtcggccctgggcatccgcttggcaaggctgctgtctgcagtttcccatcgagcactcgtggagttgctgctgagaaaggggtggtgtagatgcaatggccgtgaccagcacttggccgtctgcgctgtaggccaaggaggcctgcctgggcccacctggctgcagcggggagctgagcctccctgaggaggaaggaatcgcacctggggcagcaacagcagctcctgcctgggtccctcatggccgcgtgagccgcttcctcactgtaaagctcttcacctatgtaactatgtatcaatgtaaacaggaacgtatcctccgcctctgcatctctggtgaatccgggcgatacgtggtgagacaccttaataaacacctagatagaccctgccgtggtgagcacctgcctccaaggggcaagcacggggcattttcctggctaggaattctgtctttctcaccacgagactcttcatggacttacgttttgaaacagcatgtttgggtttgttcggattttaaaatttcattcttctttgtcttatttccatttcctggtcttatctttttttcttttgttttcctctcttggggaggtaagagtcagggaggcaggcagcaccctcacccgtgtgcctgcaacatggttgagacgcttctctcctgccgggactggaaaggtgggccctgtggtcagccggtgccgcagccaaccctgcagtccagaaagcagacgctttgctgatgaacagtgagcagagggccgggggcccagggcccggggcagtgacctctggtggcagggcaagtgctgacatccccgggctgccgggcacacggccgccggctcacctgctgaatgccacccagaggcctgcgtgatcctccaggggggcagctcctcatcctgccacacagcgcccggagacttctggaacacacaaccgcaagtggggtctaacctgcaactggaagagcacgtgactgtctgtgcctcggtttccccatcccacaggcgtgccgcccaggccaccatgtgggactgttcaggagacagtgcccggtccccagcaccaccctggagatgagacctgaagcaggtgccctccaagggcagctccagggaggggctcgcagagcagcgggggaggggccctggggggcagctgtgagtgagcaggagacacccggtgcccccacccctcacaaggccgagccccacagactctgcccaagggcagctctggaacacgtggcagtgccagctccccctggctctctctccttcacctaggttatcactaggtgtggaatggggggggaggggcagccctcccgggtcctgaccaccacgtgcgggggcagcaggacattcgcaagccagtggacctgtctgcctcaagtgccggaccccagggcccccacagcacctggtagccttctgtgtgtcctacccggataccagcggcctccagggctttcccttggacaacctttccctttggagcctgtgggggcccagcccagggcccaaaaccagctaggactgaggtgggcagtgggagcttctctggggcctcccagagcctggctggctccaccacctccctctgcccccacagcaccttcgagaagttcccccgcaaagtccccgtgggactcagggcagggctccagtccgtgtgcagggaaagagacaagccagggccactccccccaccggccggggcctcctctgggccccaactgtgatgtgccaggagcctcccgggagacacaggctgacctgtgctcagtgtggtaccctcacctggagcagtctctgtggtgggagccgctgggtgcaggagtaagacgtcagggcagagcccatggggacccccggcctggggacgtctggggcagaatcctccccttgctgcccgcttcttcccagccctcttgtccaggaccatcacccaggggacaccagggggggctccgaggctccaagggaacggtgtccagggagtcagggcggccaggtcctggggtgcctagagcgtctccagctgggaactagaccgtcgcctgcctggaccctgtgtccctcagctggagttcagggaccagcacagtgtccccacagaggggctctgggaacaccagctagatggggcagtggggccctgagcacatcccgctcaaaagccccataatgagaggccggggaagcggaacgctgtcacccctgcatctaattctgcctctgtgagtcttcatgacaacctcccaatagtacatccttcaggcccctcaaaatccatggcagcagggcctggggaccccctgaacaggcgccagtgtcacagaacctggggcagaagtagccatgcaagggtggaggccaaggagggaacaggtggaggggtgtggggtcacccagggccaaagggggaacaggtggaggggtgtggggtcacccagggccaaagggggaacaggtggaggggtgtggagtcccccagggcagttcctgagactcttgctgaggctgccaccaggccagcacgtgccccagaaaacggagtttgtgacgaaaactggagtggacttggacccaccttgtcgggtaggaggccccttggggcaggatagggacctgtgggatgtgtgcagagcccaaacctcgctgcgggtgggaggctgggctgcgccgcccctggcaccctggcctccacactcgccttggctctggatgcccagctctgtggcccaggatgcaggagggttggggtagggggacagggacgctttctgcacagccacaggccctgtctgtctacaccggctgcggctgccctgctgactcacactcagacgggttcacgacaggtgcacctcggttctggcatatctggacttgagaatgttaaataaaggatggaaaattccttccaaatccattttcttgtgtatatttctgttcctgcagcttctccacggatggagattgtctttgggaataacacagggtcgtgcagtccgcccggcggcgttttcgggcgagggtctggtgctggggagcgagcgcggagcgaggtgtctctttaaatacgctctgcagtgtgacggcggccgcccggctggaagagccatccccaccctgcggcaggagcccgcccgccgccatcgcccgccccggtccccatggttacgcgcctgcctccggccccgggtccccgctgtcgccgcgggaggtgcgcgcagaggcggcggcgctgctggccgggctgggccgctcgtgcgcggggctgtgactcaccggccggcgccgcagccccgcaatctgttgataactcggtcccagctcggccgctgccctcgcgaatggagagcgggtccccggcggggggagcgcagcgcgtctgtctccgggagcgcggcccggccgccccggcagccgcttcggccacagcaggtgggaaggacgcgcgggtctgggcggcgggagggacgcgcggggccgcggctcggcagaaaagctcgcgccccgaggtgacactggccgcgaggaaagcagctccgagtaactttcggctccgctggggcgggaggcgccacggataatccagggcccccgccccgcgcgcccggcccggagctcgagccacatccaggcagagcaggcgccgcggccgggctggggcgggcgggtcactcggtgccggttcccggtgcaaaccccccggcgcgcctctggctttgtgcagcccgagatggttgagtttggctccggagccgggagtggggcgcagattgatttttaaatatggagaaggagacgcatctgccgctggcgcgttcggtccgagccccccaccggtccccaccggcaccgcctccgccagccccaggcgcagcccccaggccgcccgcggaggggagggagcgacaggggccgcggctgctccctggcggggtcggggctgcgagctgccctccgcggggaccctccgcccgccccgctgaccgccgctgtcttcacagatgggagcagctcccggactgcgcccgccccgccgcggtcaccctgaggccaggggcccgggagcgcgacctcctggccgccgtctgggactttgaccttccagaggccatggaggctggcggggagcagggcgccacctgatcgcctccccctggacgcctcctccagcggcgctcacgcttccgcaactttgcagcgctcatggtgagtacgggggtcccgggggtcctgcagctgggggctaggccgctgcgggggggcggccacccgtatggggactcccaggctggaaaagttgtggaatggcgagctggtgaccgggcttccgggctcagtgccggggtgggaggctctgtggagtgggggccggggacaggccgcgtgtctgggcacctctgctccccgcgtgctgggtgctgatcatactaatgagttgcaggcatatggcaatgtggaatcatttaatcaatggaggcgacgtccctcccgcaaagctggcatccgtgccctgtgaaaacctggtctgtgcctgggctggggtccctgccaccccaagcccctccaccctggtcaccggcctcctccacgccaccctgccggccccttcccattagaaagttgatgaaaggcagtgcggacagacgtaggtgggcttcagcagtggaggctgtggcggagagaaggcggccgcgcacacggcaggcacgggaagggtgtttcagcgggaaggggctcgtggctggcagctggctggatcggctagccgagcccatcgtgggtccctccctgaggcaccagcaagcttttgctgcagttgctgaatgtctgggttccggaagggctgacagctgagtgaacaatgcattgtgtgtgctggtaagggacagctgacaggcggtgaggacccagggcacgtgcagagaatgccaatggcctctagaatgtgcggccgccacagacgccggctggcgtgcttcggagcagacccagtgttcgctgcataaggagccatcggtctgagtcacttgctcattttcttcttgttccgttcgaaatgtccaagcaagagagatgcctttgccaacattcagtatcgtcttccagtggctgcttcacctctgaggctggctgaggtctccgcacttacctttcagacacctgacaaggttgcgtctccagcaccagcagcacctcagggggcagcaggccagccccagggctcctgcctgcccccaggctcccaccagcctcaggaaccatcgctgttgccccgcaggtaccacacccagcgcagccccaggcctcccagttggcaggatctgtggcttttcagcctcaaattgagacccttatttgcaaaatggaaaactgtcattgacagaggacagtgaacggagaagggcttctgaaggtgggggtgctgccgcagcccgggggtccctctcatccccttcctcgcctcctcctctctaacccttggcccttctgcgaacaactgtgcgggggcctccccaatccaagaagggcaccacccctcgcaggctgagcctgttcgtgcactctcctctcagctcctggctcctggtggagcttcctgctaccacctcctcggcccggggccacccggtcccagccggcctggcagcccagagctcctgctcacccaagactgtgaaagcctgctgagctcgatctgcctggagagtgtggcatttcagcagctcactgtttttattcacaacaagtaacatttgcacctgagaaaatctctgaaagtgtgaggagttgccctcccgtgctgcatcagtctggtgcagcatttttctgcatgtgtctccaagttcacagcgtagtgtgacagcgtaattcacagcacgtgtctccaagttcacagcgtagatacctgggcaggctcaccccatggccatggggtcttgagaaggaagcctggaggccgtggccagggcagggtggccctgactctgcctgccccactgctgtgctctggggggctcctgacgcctgccaggggcaagctgcctgctgagctcccaagtgtaagggcatagggcacaggtcacaggtcagattctttggtggcatcgctcctggccaggcacaaaggcatgagtcagccctggattctgagctgctgtccagcagcttggctgggccaggccgtcctctcaaaaggctggtttgtcggcccatggtgctctacaggatggacagtttgctcccctctggaggacctgcaggccacctgtccagtggttaaagctggggcacctccttctgcaagctgtgtctccgtcaccactgttaacgagcaaaagcaaatgtgaacttgcctgtctccgcaaggggtgctatcaggacttacgttccagcaggctccgaaatgaaataggtgtcacttcgcaccctgtaacttgcagtcctcacacttaactcagagaacagttgttctcgagggcctgaatttgaggctgaaaagccacagatcctgccaactgggaggcctggggctgcgctgggtgtggcacctatggggaaacacctgcagggttggatggtgtggctggtgcagtgtggttgccgtgggatgggcggtgtggctggtgcagtgtggttgccgtgggatgggcggtgtggctggtgcagtgtggttgctgtgggatatggtgtggtgtgaagatgtcgtctggccctctgtggctactttcattccacaattgcaatatttaggtgcagctgggagcatgagctcatcgtcccttcagggttcaggccctgtgccgatggcaccattgcctggttagcatctgtgtttctatgtggtcatctgtgagctgccagctttctgtgagtagggtggaggctctcaaaggggactcaaccgagccccttccagctctcaattcagggctgactcttggtcatcagaggcgctgtttgctgcaccctgcatgttctcaatgccgggattgagtgcgaggacaagcttgggctgggggaccccagagacctggtgtgtgtagggagctccttgggtctaacacttccttccccagcttctgaaaggacagagtgccttcgaaacctccaaggagacgaggcgggtagccaaagggtgaagacctccaaccggagggtgacaggcccaaggtcaaggccagcctcctggcggtgcccccaggaaggggagtctcggaggccgagagtgaggaggagcctgcagctgctccccgaggccggacccatgtgaagtccgccctgaagagaaccaggatcgggtcctggcccaaaggcaggttgtgggagactcggagctctgagttgttaggaagtacgtgagcccacatgaggtgggtttatctctgctcaaattttaccccttggcctctgccaggaatgggcattcaggaggtgggaggggcccgggacgcagggcctctcacagggcgtaaggatggtcggtcgcgcgtacgaacatttcagagctatactgagttcttttcagctagttgttttttagtctaatatctaaattactaaaaatggctacagtctacttccttcatctcacagatggagagtttgtcatcccacctcacatcttcccgaaaattaagaactttaagcaagtaactaccagtctagaaagaaagcgtctatgatattttaacacttttttcccaaatctcttcaaaacttcactagcccatctactcctccaagaagaaaatcataacgcaccttacaaacgtaatgccgactatgggtcatctgtgttctggaggaataaattcttctcctctaccttccacctttcccctggaacacatccatgaaaagttgacagatcagtagatgcaattattatttaaaaggcagacaagggaatacatcaggctctcaggaaatcagtgttcattggcacagaaccaggaagtaaaacagggagaaccagaaaaaacaagaaagagaaacaggaagaaccaggaagaagcacctgaatgaagaaggagaaatagggagggaggaaggaaggaaggaaggaaggaaggaaggaaggaaggaaggaagagagggagggaagggagggaaggaaggaagagagggagggagggaaggaaggaaggaaggaaggaaggaaggaaggaaggaaatgaagggagcctgaacctggaagaaggagaaggaggactggaagcacctgggaggatatgtgttccttcctcagccagttggagctgcagacctggccccggacacctcaccgtgcaggaaagaaggttcctcagccagtcggagctgcagacctggccccggacacctcactgtgtaggaaagaaggttcctcagccagttggagctgcagacctagccccggacacctcactgtgcaggaaagaaggttcctcagccagtcggagctgcagacctggccccggacacctcacccgcagggaggaagattccttcaggcagctggcattccccaggtttgaagaggtcactttcccacctctcactgctgcagaaaggttaagttttgatcagaaaattcacacataacttgaccgactgcttccttctcatctttcctcctttgtttttgtctttaacaccctgacccacttgatttgcagaacacaccaaagaggagacctccaattaaaatgagggaaaacagaggaggaagttatgactaaagaaagaggagacacaaataagccagagcacgagtcccacgcacgccgggctcacacgctggcgggactgttggctccgaggccggcagatgggagatggatgcccgccttccccagggaagcagagacatctctgggtgccttctagagcaacctgggccatcctgcgggcacagaaccaagctggcattccggccatttcatctgggccaagaaggtcggggccaccttcatccgccccttcccagcccccttgggtcctcggaaccgtgttcttcaccccccaggagcctggctgcattgcgagccgagggtccaggaactctgcttctgacttgctggctcacccctgtcagccaggctctgttcagccacagatcagaccagcaggcctggggaacacttgcaaagaagaatcggtgcatgtgcaaactttaaaagacaacacacgtctccactgcacatgacccactttgagttttaaatgtcacctctgaaaatgtagacaggcactgttgataactgtaatttggagacaagaaaaagaaaagaaaccaaaccaaatcacacatctgtttcttataaaacatcttgttgacacacggatcattgcacaggtgaggaccatggcccaggcctccagctcacgcggcagctccaggcgtccacgcctgcccttgccgcctcagtccgtgtgaaacctcacagcttggccttcagacgagaagccccacacaaggcggcgtggccctcgctgtcactggagcttgggcggcctcctcccagcgcagcctgcaccttgcactcgcgccctgagacgtttgcctcttgcatgaaaagcagctctgattgggcttaacatgaaggggtttgtgtttgtgactaaaagccacaaacgggaggctaagtctccttctggccctgaggatggaggcagcgggacaggacgcggctcgcaggcaccagacatcagggcacacactttcctggctgccatctgcgcctccgcccacagtggcaccgcccctcgcccccgtagctgagcaggagtctgagtcctgcaggaaggcgcggcggccacagcagccccagggaggccgtgagaggacgcgtgagggcccggggcagaccaccccaggctcttcaacacaacagatgagaacgaagtccttgttccaggcgactcactgaggaaatgctccgatagactcggagagggctggacacagagtggaccccactctcttggcttctctcgcggatctgggtttgcaacaatggctcgtcggaactgtgtagagcgttcaggtttattttagaccctgggtcaatgtcttggaggaaaagccattgactctcgtggaagaatcctggggacaagaatctggggcgtcgctcacgccctgttaaaacttcagttcttctacccacatggggcattctccacctcccagcagcagataactcactggataacctgatgtcgggatttggccgggaaaacatgcttttctgtgactttggagctgtttgcacgtggcaggaagtgggcgcctactaaaccagcaaacgtgggacaaccagcctggcaccgcccgagccacgccagagcccccatgcatcgtctcctgatggcaagcactccagtagccagaacaccaaggagggacgtgcgaatgtccacagttggccgggctgtccctgggctgatctctgggggaagcaggagccccagctggagctcggaccggacactcaccccacgactgttgcaggaggcaactgacgcttcgggctctggggcactcaggagaatctggacagaggcccacccagctcacctctttacagaggggcagagtgagggtggggctctcctgggccctgactcccccgaaaaccctcaggggcctctgtccagggtgggcctcagagccaagcctgaaccacagggcgctgtctctctgtggggtcctggtgtccaggaagaaatgggcagattctaaacactccccggaaagcaaagtgtctgctgtcactccagctctgcggccccacagcgacgcccgctcctctcccaggtgccttcgccctcgcacaggtccaggctcctcgtcccgggatgcagggcccctccggtgcccgcctggccagtgctgttcgaaccctggggcaggggccctatttcgggctttgactgtcagccagtcccttggctccccagagcaccctctgtccacggtggacactctctagccagccagggcctcgtcttggctggacggacaagaagtgtggcctcaggagggaagcaggagctctcgggcccgctggctgcctgcatcccgacacaggtgacactgcctctgcccatggcccttcctgcacaggagggtccctctccacttcccgcctcactcagccggagccatcccagaggcccggccggctgcctcctcctgccccgatgcccagggcagcatccatggcgtggtcagagtggctggagcctggcacaggtgcagcgatcaccagggggctggggaggggccaggcggctgcagccctcacccctgctggcacccacccacagggttcttaccggaacatggcacccaccctgctcgcctgcctgaggttcataactaaaccctacacagtggggccctgaagcacagacatgtttcccacagtctggaggctggaagcctgagacagagctgagtgcaggctggtgccccgaggccccctcctgggcctgtgcacgcatgtttctgggctgatgcccctgaagccccctccccagcctgtgcacccctctgtgcttccccggtgagctcacctcactcacctgatgaagaaaagatgaagctccatcagctccaagcctttccagctgggtcgattttcccccagtctactctgccacagagaacacacattcccctttgaactctgaccctgaacccttttcttgggccgagaagcaggtggagtttgcggcctccggtccaggtctgttggtgccgaacagtctccactctttctccacctctcgcagaagctcgtacagaatcctcccggaagatgttgacaagcagggtttcgatgagtgtggggctcccagtgcagggctggggccatcccatggtttccctgcctctctgtaaggcccatccagatcccacctggccacccgcaggccacgggaagagaggaggctggaggcaggcatcagtcggccgatacatggccccaggagccagcctcagagccacacaaggatgcctttggccagcagagccagtggagggcgaggacagacagcactccgtggccacgtggggcccctcccgtgcactccctgagcatccacagacgcagcctgaccgtacctccccaggcagccccccttccctgagaccccacacgaaaatgcctggagcggctgcaggggaagccgagccccaagggtaggctcaggcgacggcgccgcccacacagacccaccagccagtcacacacgtctcctttgctttatcctcaggatctgaagacagtgctctccctgccccgctacccaggggagttcctgcaccccgtggtgtacgcgtgcacggccgtcatgctgctctgcctcctggcctccttcgtcacctacatcgtgcaccagaggtgagcctggcatgggcaagggcgccccctgtgcccaagaaacctgcttttaccttcaaaggcaagtccctgaagggcaatgccactgccccctcatgtagcaagaagtccttgaaggtacaactcaggtcaccagctagctcagacccgctcagcagcctggtgcccatcacacagccgaagggtggatggagctcagggaagccgcgcctgtccactcaggcctccgtcagggtcttctccacggcatcccccgtgtccttaactgggcaaaataagttcttccagaaataggtgtggtgtccgtccaggcaccctgaggagctcagttcccccgggcagtcactatggcctgcagagcctgggagaggcaccaagaacatgagggtgtccagccgcagtcagggtgggcatgcccacagccagtcatgggcgggggttcggctatgtctgaggccaaggtcgcctcggtcacggacagagcttagaggcgcccagggccacagtctcatcagagactcgggcacacacgaggctgtgatcacaggaagaggcttgggcggttccgaaactgtcatcttggtctgtttgggctgctgcagcagaacacgggggcctcgatggtttatcgacaggagaaactgacttctcagttctggaggccgaggtcccagatcaaggcacccatgacgctgtgtctggtgcgtctggagagggccagctccaggctcacagacggcacccactgcctgtgtccctgcctgtgtccctgcatgtggagggtgaggcactctgggggcctctttctcaaggtccctgatcccatcaccacagctctgcccagaggcccccgcttccaaatatcatcagcttggtggttagtgccgtcctaccaactcggggggaggcagataaaatacatttagaccagagtggctgtgattatggggagaggatgaggcgaggccatggccagagtcacagtggccaccatgcagccatacctgtgctggccacagcctgggcgggtcgggccccagacatggtggtggtcatggaaagggtcacagccacaggagggcatggccggctcagccccaggctatagccggggtcacgctgagccagtctaatcacggtctcttcctgatgtgccagacacctgctcagagggacaccccatgctgggacccagggggtgcggcctctatctctgagacagtgtgtggccaagtcctggagtctcagggcctcggtgtcttcatccgccaagggattaggttgttcaggcttctgcaaaccccttccagcgtcagtgtgccagggtgacgtaaggcagaactttccagtggccgtcactcagggcagactcggacgacccatctgctctcccctgaccgggtcctcggacagctgcccctgaccccacggagagcccggacttcccggggacagagcctgcgccccagggggctcccttccacgcctccccctgcagagcctctgctcatgtgaaaccctcctttcccgtcccacagcgccatccgcatcagccgcaagggccggcacacgctcctgaatttctgcttccacgcggccctgaccttcactgtgttcgccggcggcatcaatcgcaccaagtaccccatcctgtgccaggcggtgagtgccggggcgccctcgttggctcctcccagaggggaactgcgtgagcgtcgtcttgtttactaaataatattccagcgtttgctcagctatttcccgggaagagggtcggaccctggcacatcggtgtctcggcttcacgccatgcaagtccacatgctccacgtttgaccccagggttgattccactgcaccgccccctccaggccggcgctaacctgacacttactgtccccaaaaggtgcactgcccgggaacagggacacagcctgcccctcccggagaaagtgctggggggacacagcccgcccctcccggagaaagtgttggggggacacagcccacccctccaggagaaagtgctggggggacacagcccgcccctcccggagaaagtgctggggggacacagcccgcccctcccggagaaagtgctggggggacacagaccacccctccaggagaaagtgctggggggacacagcccgcccctcccagagaaagtggtggggagacacagcccacccctcccggagagagtggtgggggcagctcgaggaggggcacacactccggtccagggaggaacctgcagatgctgccgcctgagtcaccaggagggcaagctcgtcctttgcacagaccccccaacccccggaagccaaacagaaatgtcactcggggaaccctcctcccccactgcagggagagctggagagcaccgagcattgaaaagaacgacacacagaagggctcctcacatccgggggcccagcctgaccttggtttaaaaggggggacgtatacatcacactcagttcctggcagagctcatggtggagacccttacatcaaaactaagccctgtcctcctccactttgggctgtggctcatggccaacaagaggacctgcccggagcctctgtagccacagctccggggcggctcctccccgcacacccagcccagtcccagtggccaccccacttcagcagccacacagcccagtacagtcacctccagggcccagacacagccagggggctgccacggactgcagggcaacttgccaggggtccaccctgcagtttctggaaccctcccatagtacctggcactgacatgcacctgcagacagcagtggtggagactcatgcaggggtgtctggggagaatctgagctgagtgcacagaaccccccagactcccccacaggctcccacacctgcctgccacggccacgggcttccttccttcccagcactacacttccgtgtgccaggctgggacgggccgggcaggcgctcacacaaacacagggccctggcgtccggcacgcagaggagacgtcatgtctgtgtgaccacacttcatgccagactgccaggaggccgtgcccccggcctgggcctgggcctgggcccagcatggccccggcggaggagtcgctggcacgcacctgaaggtggctaaggtcagacgtacctcctgcctccttaatcattcctctggtaagctggaaacaaccacagcaagtgcccgggaaacgccattgacgtcccgcctgtaagtgcctgcgagaggccgtcaccatcacgtctgcactttgccaccaagtacgccccacactgggatgaagcctgctggatccgcgggtgaggccccccgagggccttcagcaaaccccgcccgcgccttcgggaacacctgccactgcttgcctggacggagctcctggggcccaggcctgcggtgacagctcggggcggatgctggggtgttggggctgcagcaggcaggtctggaaggttccagagggttgcaatcttggaggagatcttgttaaggcaacagccatcaggaggaaatgagcagaaaagattgtggcctatctccagatgctgtcctgatctcccagggagcacgatccactcactcgctcactcagcaaatgtgctgagggcctgcaaggtgccaggccatgctgtgggcactagggcactgccagagacaaacccacatggtctcactgtgaagccgcgttccagaacaggacgcaagtgtggaaaatgaaccgtgggagcattttcccacggcaggtggtgggaggtgcctgccggacgcgtgacgccaggctcgggaagcggaggcaggggccgcagtggctgcagctccagagccactcggggagcccacaaggcgacgttctccgagctccccgatgaactgtctgctccccgtgctctgcgaggcgaacagaagccctctcattgatctaacgctgaggccaggccagttccgcattcccgcctccgggtaaggaggagaattcagccactaccggctggaggaaggagacctgagggtctagtaaaaactagacttggagcccaacctgcctgcatatgggccagtggtggctgatccgccttcccgcctgccccgcccttgtcacacccaccttcctgcccgcctgccccgcccaccggggccacagctcagcactgagtgaaacctggtcccaggctctggatggctggagaggacggactgttgctatggcaacaaagagatggccgtgagccccattcgcatgctaagtgacacattcaacagagacaggcgctggccctgggtccggcggggtggggcagccgtgcagcaccgtgggacgctggtggcttccctgcagcctctccatctgtccagcctgaagtcggtgtccaggactcagagctctgccacgtacaccttcttgtgacccccaaatgcacatggcacgggtgaggctcagctctgccaccctcctcagcgccccgggcagtgacactgacagccccacggctgcttcctgaaaagaaagaacccgaggccgggctgtgggggctgcctctgccctactcctcgacacggtgccccatggtttccaggcctccctgtctccaccaggctgcatgaggcctaggcactgggatgggacacgaccccacactcagtggccaggccgggggaaagggtggagccccccgggggctgctgtgtctcctgcccccagcggcgcacagggatctcacctgaaactgcaaacgcagccctccgatctttccagcccaccccacaatattctcatcaattactgcagagcctcctcatcagtgaaaattgagctctggatctgataaatcatcataatggtgcgacgttagctttatgcggcgaatctctgtattccttaaacatttatgtcctttccaattatagcagtattttacctgtcatttcaaaatgtcaggttattactccaaaggtagcagtgtggccctcgtaataagcaaacgcaggaagtttccatagcaatgaggaacggcgacctgcagggccacacgaatgccggccccgtggggggctcatcccacccacagtaagagcatcctggtgaatgaggaacggcgacctgcagggccacacgaatgccgtccccgtggggggctcatcctacccacagtaagagcatcctggcgtgaccccactgaggacttcacctcctctcccttggtggacacctatccaggtctgagctcaggggacgttggtctgcagctcacagtgtccgtgcctgggccacagggaccacagcgggttgtgcatgcagaggggcgtgagtgcacaggcccatgggtccccacagactccctgctcccgtctctgtgcagaaggggaggaaagctgagccgctcaagggtctctgcagctcagcgtctccctgtgagttctgggcggctgtggggcggccgctgcctgccctgggatacagacgctgctggccgcctgccgttctcattcttgaagttgcaagcccgggccgaggctgctgggctctggggggtgggtgcccgccaagggcctggctgaccgctgctcccccacaggtgggcatcgtgctgcactattctacactgtccaccatgctgtggataggagtgaccgccaggaacatctacaagcaggtgaccaagaaggcccctctgtgcctggacacagaccagccaccgtaccccaggcagcccctgctcaggtactgagtgcacatgggcgcgaggccccgccacctgggccctggacgctgcatgcaccttctgggtcttggcaaaccttctcaccaggccaccaggggcctgaggatgatccggtccatgggggagggtcagtgttcccagggagggtggagagcgggcgacggatctgagggtagggtggtgtgctggaggggaggggcgccggaggggaggggcgccggtcactgggggtggggcagagggggccctgagggtggagggtcccgggtggagtctgaggcaggcggtgccctgccctccacatctgcagctggagcccggctgctctggggctggtctggggctggcgtgtgttgggggctggacaagcctcctgtgctaccgagttgctggcgtgagaccctctatgccccgcagggcagccacactggggaaacgggctctggtggttttggcttcggcttcatggtctccgtaacatcaggcagctgactgtcagcgggtggaaaacctcacacactcaggcactcatttcaaggtggccctggcctgggcccttcaggccaggaggcaggtgtggtcccccagtgtctctgctgtgtgaggcccggttgctgggatgggacactcgccctcccccgccgccccggcggcctgcaccagctgttggtccccatccatcctcaggctgggaatgcaccgtggcctttgtgggaaccatgggcctgcctaggggggcggacacagcccatgatggcacagacctccctccctctctccctcagtccagagccaggggaacccagacgtccacgtctgggaggtggcaggagctcctctgcaccagcaggaaaaagccgggtcagggagctgggacagctgctttagacgggggtctggccgcggccgtgaccaggccggagctcgccagggagctccagcgcctttggtgtttccttttctgaactgagactgaatcccagacacagttggcgaaagccaggctcggagcgtggcctcgaggccttgggtgcctacctggcccatcctctggggttccctggggctccctgaatgcctgcccagagtagcaccctgtgtgaggcacccccgccagaggctgctctgtggccagcggtcccagggggtcttggaggacattcatccggttgcatgggagacgtgacccggtgctggcgcacggacacctgcttcctcggaagggctgtccggcactgtcccgtccaaaacggtctgaagaattcatttcaaggcagatacagccacgtcctgtattgttccagcaaacagcactcatttgcacccggagcattttctgacactgtttgattttcagatccacgcagacacgttgccacttagcaaccagggctgggtggtgcttctgccgctgatgggggctggggaggtagggtttcattatcttgcctctcctgccagggaggccccaggtcccctgggtgtataaatcactctcaaaatgcgtttcctcatctgtaattgatggaagagctgcctggttttgaagaccaggctggcagccgtggaacaccccggcgctcttccatccggtgtctgccaatgcgcgccgcagagccgtgcgtctgtccaggtgctggggggccagcgggcccggggctcggcactgaccggcggacccagcgacggcaaggccctgcttgcggccatggtgccgaggcgactgcttcctcctggggctgcctggagacccccatcctccaccccctgccctctgggcccccttcctgtgtaagaaaggtcttgacattgtggcagggggtgtccacacagtgccgtgttccagctgtgttccttggttcctggcctgcctcgtcgctccgcctccccagccgcccccccggtgtctggccagggctcagcctgtgcacccctgaggcaggtgcagactcaggagtggtgggcggtgttagcttgggctttgccgagggcctgccctctccgtggctgggcctggggctgctgggggactgtgctgggagactgggctgcacctcctcagggaggccagcaggctggagcggggcctttctccccacaccccgaaggtgctcacggtctgccctccaggccctggtccagagcctccgctcacctccccctcctccaccaggaaacctcctcatcagagaagcccctcccagcggccctgcatccccagccccattcccagaactctacatggcccacacgttatccacgccagcagaaatttagttcctgagttccaagaatcttgcggtctgggagggaagggcacagacgcctctccaggcagcacgtcgcccacaccctctctggccgttcccatcctgccctctgaaaagaatgcccacaccacttcctgccggaccctccgccgggacagggcagcgcagccagctcccactcacatgggcagtggccgagtctcagccgccgtgcatgaaggagccgtgtgtaagcccccgtccccggcccagctctgcaagtgtttaacaagaaataacaagaaaacggctgtccccgagaagcagctgcgtgaactcaggacgctcctgagcagccgacgttttgagaaagccctcgccatcctgaaggcccacagctggggttggcccacatgcaacggccacctctgctctgcttcctggaaaccaaaccttcagagtccagggaagatacagccatgtaaaatgttgctgcgctggtgtccgtgagcatttcacacgcctgagcccctttctgtgtgagcaggggggatgccccacctcggctggggacctcccctctccacaagacagcctggtcagcagagggggcggacaccccccaagacccccaactctgcagggattggactccgtgggcaggaacctgccctctggtcagggcaaggtcaaggaacagaggggccagtccagggaggcccagcagcgagaagccagcagcctctgcggcccgaacgttccagctgcaggggccaaggtcacagccgccatccacctctcccctcaagcaggagtgtggcccttgttactaggacaacccaagcctggactctgcaccggattctgccactttctagatggggattcacctggtctcatctccccttagtcccagcatgagccccccatgcatgtgggcctgtgtggagagatttgggggcaccctctcccaccccggttaggaggcactgcacagccaggccctcagaaccgccctgggtctgtggaggggcagtggcctgatggggatccccgccctgatgggtgtgtggcctggagcccacaccagggcaagagcggtaggactggagcctgaggggggcgctttggatctggggggcgccggagcccctgctggctggagcttccctgcttcagtcccaggcccatcactcccctccattcacacagcgttttctccaaattccagcagcatccggtgaggcccctgctgaccgaatgagtcacacgcaggctccagctcctgggaacccttagagacccttttccaggcccaagctgtggtcctgcctgggaccctgcccagcaaccccaccaggatgggtccctctgctctcttcagcccctgctgtgccaggatctggtcatctccatccacccacatgcatccctgtgggcgtccccagcacagcagcactgggccaaggagggtgcccaggatgggcacagcctggcctcagggcgcaggggactggagagcccccaggaagggcaccagccatgagatgctggcttccccgcatcgggggtacggcagcagacacccatcccagatcctgtcgaggtgaggcctgggcgagtggatggacgtcacacagagtgtgcagcatgcttcctgggggaaggccatcgaggccaaagaccctcacagataaagcggaaggtcatgtctctgcacacagtctcacccccgcggctcagagtgcccatcgcgggctcctgggcagtgtttatctggggccacgcccgctctgagcgccactggagtcacgattgcatctgaaggccacgttaagaagcgtcaccgtttcaacagcaccacgtcttccaattcgtgagcacaggacgtctttccttttatttagctctttaatttcttccagcaaagcgttgctgtctccagtgtacacatcttgcacctccttggttgaatttttttcccagggattttattcttttgatgttattataaatggggttcttttcttaactttcctttcagattgcttatttgtttgtgaacaaaacacaaccgatttctgtgtgccaaccttgtgtccggcagctttgctgagttcctttattggctctagttggtgttttgttaattctttagtatttcctgtatatataattatcacgccatctgtacataaggataattctacttcttcccttccagtctggagggctttatttctttttcttgcctaattgtgctggctacaacttccaatacaaaatgagtctctcttttttttctttgtcggtctagctaaaggtttgccaattttcttgatctgtttaaagagccagtttgagtttcattgatggtctttatttttctgttgtctattttatttgtctcagctctggtctttattacttcctttcttctgttagcattggatttagcttgctcttctcttttcaggtttcttgtggtataaaatcagatggttgacttgagctcatttttcttatgtggatgttcacagctatgaattttcctctgagtgctgcttttcctgcatccctgagctgtctcgtgggtttttttgtttcatttatctccacatagtcatttctgcttttccttgtgatttcttctctggcccattggttgttttaaaatatgctgtttaattctcacagatctctagatagtcagggaaaaaaccaccctgtctaaaattgtgctgcaacttttagtgtcaagctgaatgaagggagtccccacttgatcaatgcagtgtggttttgggtggcttgtctctgcaaggagatcttcattacaatgatgaaaaacattttttcatttcttttctgtgatttgggtacagcagaggggtgtgagggagtgggtgaccctgcacatcctgctgtgtggcctgccctggccagcccagccttcttccctttctccacatgtgaggagtggagtggatgtgggcacgaggggccagggagtgcctcaaggttaggcctggaccaggcatcacacagacctccccgagcacacctgggagtgtgcaggacctgctgccctgctggtgtcttcagtgcaggcatggttgtaggttgtgtgtgaatctggtccctggccccagagctctgcctcggggcctcctgtgggtgagaaaccacacagaacctggcgtgagcctttggccaacagaagtgtcaccctcagccttgtaggggagagtttaggagaaggacaggtgcagcctcaaccgaggagtccatggactcttggcactgctaaatggggctagggtgactccgtggagaaggaagcagggagggacaccagaagggaaggaggaagaggattggcagggaggagacagaggtgttggacacaggaccccccaggcccacagaggcaccggctcagccacccaacccctcacagtggtgcctccttggattcaggcaccctcacctttgaccaacatggtggccactgtcacctcccaatactctcaagattctagacactagactctgttgcaagactctgttgccagtccacaaaacaccatttgcagtctgcccaccagtcctgaccactacacacatttgccgcagcctcctgatgcctccctcagatatcccaagacagctcaatactgggtgcatgtggccccagctccacccctcccctcacatcctccatggtcccagctccactcggccccagctccacccctcccctcatgtcctccatggtcccagctccacttggccccagctccacccctcccctcatgtcctccatggtcccagctccactcggccccagctccacccgtcccctcatgtcctccacggtcccagctccacttagccccagctccacccgtccatcagtcccacaaaggaaccagctccacttggccccagctccacccctcccctcatgtcctccatggccccggccccacccctgcccctcatatcctccatggaaccagctccacccccacaatgtctttgcagctcagcagcagcactgctctcccagcattcgtgtctgggtgctagacattttgccaaactctctaccccctttcccagatcaggccacacctccaggcccaggagtcttccccacctttcctgtccctcctcctctcccagcccccgctccctggacctcatctttcctgctctgtggactgccctgaccccagcgggcctccaggtccctttctcagcctcctgctctgccacctccacaccacctggatactttttctccccagctggaagcctgactgcttgcccccacgaccactccccagaccccccattgctgctcagctgtggctcagagccttcctgtctgccccttcctggcctcacctgccctttgagcactgagggtcggtccctccagtgggatggttacctcccgtctccattccagcctcctccctgcacctcagcttcctcttaagtgagaccccgaccttctgcccggtgcccacctcctattgcagagcaactgtcccctgacctctcctcccctcgatgacaatgacgggaaggtccctcctggttcatattctccaggcttggcatccagcccctcctgattaaatgttgaaaccagaaagagacaaacggcagggatgtagtaaatatgtgtgaaatcggcctccaggctcagctgggctggatgtgtcgatggaaagcaatcagtttcatactttgttctgaggcttgggtgagcagcacactgcccgtcatgcagtgtcaggccccacggcctctgcacactcagggcggggctggaaggactcgggactcagcagtggtggcattcctgggtgtggtttgtctccacagaaagatacactcagggaggggctggaagatacactcaggactcagcagcggcggcgttcctgggtgtggtttgtctccacagaaggatacaccacagggccaacgagggaaaagacatccagcagggtccaagactccaggtgccgtctccaaagttctcctgtcctgggagacggcaggtggggaggatccacacggaacctgctccttcctccagcagcaaaatgcagcaaagtgtgccccgcacttctgcccaggaggccgctcaggctcaagctccgcattcttgctgggacaggtcactcctgtgtgctctgccagctccgctggccacagctacggagcctcacactctggcgggaaggcaggtgctgccgtcagtcataaggttcatgcaaacagcccaggctgctgtagtgccacatcctgcgtccctgcacacagagcagccttatcaggcagtgcgtggggaatgtgctgaaagccactgacccaggcacctgccacgccccagagctggcccttctgcagagcaacactgagctgcacagggtcgaatgttcagagagaagctccttggatctgccatttctaactatatgagtgagaagaaagaaagcctgagagagagagagtcggtaagaaatataaagaaatactggaagaaaaagaataagggcaaatattatgcaccctgagctgaccctttgtacacaaaacaaaagccagtggtctgatgcccatgtctgaacaattagcctgcttcctctatacccatatctcacaatccagatttattttccggaattctgttttgacctctattcagcctcttccccttccttgtctttagtttcctgcccaatccctttgccgcagagtgatgtctgcatggggccctggacacaggtgctgctggataattcagtgatcccaggtccccaagcacctgctccaatgtgagcacagcccactgaagggttgtttctgaatctgttaagtggaaatgtggctgaactggggaggttctgggtaggctgggccacctgcccaccagggacacctgccctcctaatcctgccaagccacctgcctgccatgggcagctcccctcctaatcctgctggccacctgcccgccaggggtgcctcctctcctaatcccaccagaccacctgcccgccgtgagcacctccctcctaatccctccagacaacctgcccaccacaggcacctccctcctaatcccaccagacaacctgcccaccacaggcacctccctcctaatcccaccagacaacctgcccccccgggaaccatccctcctaatcccaccagaccacctgcccaccacaggcacctccctcctaatcccaccagacaacctgcccaccacggacacctccctcctaatcccaccagacaacctgcccaccacggacacctccctcctaatcccaccagacaacctgcccaccacggacacctccctcctaatcccaccagacaacctgcccaccacagacacctccctcctaatcccaccagacaacctgcccaccacggacacctccctcctaatcccaccagacaacctgcccaccacggacacctccctcctaatcccaccagacaacctgcccaccacggacacctccctcctaatcccaccagacaacctgcccccccgggaaccatccctcctaatcccaccagaccacctgcccgccacgggcacctccctcctaatcccaccagacaacctgcccgccacagacacctccctcctaatccctccagaccacctgcccaccacaggcacctccctcctaatcccaccagaccacctgcccaccacgggcacctccctcctaatccctccagaccacctgcccaccacagacacctccctcctaatgcctccagaccacctgcccgccgtgagcacctccctcctaatccctccagaccacctgcccaccacaggcacctccctcctaatgcctccagaccacctgcccaccacagacacctccctcctaatgcctccagaccacctgcctgccatgggcatctccctcctaatcctgctggccagcccactttgaggaagggcctctaagtagacagaactttccacattttctgctccctttgccagccaaaaggaagacactccagaaacaagcagaccttttgtgatttcataggtgctcgggggctgattccccatttagccatgaataatgacatcttaattttgcagtacggccaccctttctgatcaagtgcaccaagctgtgtcagttatttggggtctgcgggccgcatcggttatctggggtctgcaggctgcgtcagttatttggggtctgcgggccgtgtcggttatttggggtctacgggccgcgtccgttatttggggtctgcgggccatgtcggttatttggggtctacgggccacgtcagttatttggggtctgcgggccgcgtcggttatttggggtctgtaagcagtgttggttatttggggtctgcaggccgcgtcggttatttgaggtctgtgggccgcatcggttatttgaggtctgcgggccgtgtcggttatttggagtctacgggctacgtcggttatttggggtctacgggccgcgtccgttatttggggtctgtgggccatgtcggttatttggggtctacgggccacgtcagttatttggggtctgcgggccgcgtcggttatttgaggtctgcgggccgcgtcggttatttggggtctgtaagctatgtcggttatttggggtctgcgggccgtgttggttcggttatttggggtctgtaagctgtgttggttattggaggtctgcgggccacgtcggttatttggggtctgcgggccgcgtcagttcggttatttggggtctgtaagctgtgtcggttatttgaggtctgcgggctgtgtcggttatttggggtctgcgggccgcgtcagttatttggggtctataagctgtgtcagttatttggggtctgcgggccgcgtcagttatttggggtctataagctgtgtcagttatttggggtctgcgggccgtgtcggttcggttatttggggtctgtaagctgtgtcggttatttgaggtctgtgggccacgtcggttatttgaggtctgtaagccgcgtcggttatttgaggtctgtaagccgcgtcggttatttgaggtctgcgggccgcgtcagttatttgaggtctgtaagctgtgtcagttatttggggtctgtgggccgtgtttcggtttggaagtccaatggcaccgcggcacttagattccgtgtcacggcccggcttgccgaggatgcctgctcccgccttcacctgcctcgcagcctccccagtgctggccaggcgctgagggatgcttgaccccaccccatggatgagtgatttcctggggctccttcagctgggaaccctctctaggccacagggcaaactctggagactgccttgggcttgggacctgcccgtggccacgcactgggcctggcttggaccccactgggctggggccctcgggcactggggccctgggaatggccagtaggaggtgtccactccctcctgttccatctggaatgcgtgcctgaggccagtcctcaggatgagctgcctaagggcgggcagaggtcacaggcgagcaagcgacctggcgcctgccacttccaagaatgtgggttcactgggagagggcaaggatgggggtgggtgggagggagccgagggagctttgtgcggggaaaaccctggaagggagcagctctgagatctgtgaagcagcctcccgccccttccccatgtccctgtggaccctcggacgtcaggccaggaagggcctgggcctcccacttggccctctagcccagccgtgagctttacagatggggaaaccaagggcccacaggcacggggacttacccagagccctggcctggccaccaggacctggcatctcacactttggcggtcccctgactctagacaccatgagtacctccgtctcctgcccggtcctgttgtctactgacagcagcgctggctgaggaagggaggaggtgccacgtggtacaaccccttctccacccctgggaacagcaccaagcccagtgcccgcacacttagctcccctgagcaggagcagagggcactggagcttcaagggcagagcgggacacaccgccactgatgcctgggtccagggatggtacctcgaggccacatgtggcctgacgtcctgggacacagacctcgccctggaacataggtgctcttcacagcacaagtgatcctgcagacccatccttgggcacccactgcaagcggaccagagcggcggtgctatggcattcaaagcatcttgtcagtcacgaagcgtcctcagctcatgtctggagctgggcattgtggtgccgtctgcagggtacagctggtgcccaggacagtggccctgtccttctccacctgactcctgtctcgccagcctaccttcctcccgacacccgcggcgtcctcctgcatccaccctcagaggttatcgaatgccgaggagcccaggatgcacttccgaggctcactggtgactttccggagatacttaggcaaatggacataaatagctcttggatcctagcaggaattctcaacctcatttctcggaattcagaagtcacggttaactcaaagaatgctaagcgggccagggatcacgatctcacagatgggtcccgtgtcccagggcagtgaaggtgccggggccgtctcctgagctgtctgctgcccggtcctgctccgcccgcccctgcgcccctgcaccaccaatccaggcagctccctgaggctgcggtttccttggctccttctgctccctgggcagtgccagcctcgggtccacacctggaatccaccgtctttcctgtgaaaaatgacctcagtgcatcgaaggcccccaggggccgcaactccatgagtgcgactggttggtggggcagcgccactgtcctggggacgtgcttccagtggaggggtggctaggagcctggggggcttcatcgagagggtcccggaagggcccagtggtcagatttcagcggtgcacctgggcctcaggcgatggatgaggtgcacctgggcctcacccatcgcctgagtggggctgtcccgagtccaccctcagcccctgagccctcctcacccctcggccttcccctaggcaggggtggcgcaggctgggggcgtccacatcgcctccagcagggcaatggcacacaggctctgcccagcggtcagcagcaggcacgggcaggcacagggagcggggaaccccagagtaaagggaaaccgacaaggcctctgcacctgtgaaagccgggccctggatctggccaaagaacagtcctcacgaggccacagctggactcagcctagaggcctgaccccaaaggacatggtagatcgggggtaccccgagaagggcagcccccaggcctggcccatgcttggcagaagggcgcgcagtgctagccagccacctccttgaagacttggtgggaaatgagtaatcacaggtggctccccaggagggaggccaggaccccgccggcactgtggggactcagcacagccgagggtcggccgatggcgttgtcacccctcccgggccccttgaaccacccactgctgggacccttgacacaccggctgcaagcctccaaccctcactgtcctcaagagggccacgttcccttgtcctctgagcctccagggccacacatcagacccagccctgagacaccactgccaggtcctggtgtactacagcccccaacccctccctgccttccagagaccctgccccaggggagagctggcgctttgctccagcatccacccagcaagaccctctccctaacttatccctcccgctcacctctccccttctccctccctcttttccctccccattcccctctccctccccctcattcctcctctcccctccccaccttccatcggcttcaggccaagcccagggctagacgcatgcctggcccacccacgccgctctgcaggggcattcctcgtggagcccaggccccttgcccccctaccctgggccgctgcccagtgcgaggccatacggggcgagtgtggattgggtgaaagacacagtaacgaaatgtggtgaaaatgctcctgggaaccgagctgatccgcagggcctgtgccttcgcctataacagtccctcggcctgtgggggaccccaaagctcccagccgccctccccgcagggcctgtgccttcgccttcactgtccctcaatcccaaagctcttagctcctacgtggtccaggctttgtcagcgccccacccccaccccccgccaccacccacggtcccttcagggccaccacggctactccagctccctcagtccctgtctggggggcgtccctgggccctgcccaaacccttctcccacccagaccacacccaaggccgcccaccagctgccccccagcacacccaacccacccacaggcgtcctctccccccaggtgtggcagggcctctcacgatgaagagacgcagacactcaaccagaaacgggcagcccgaggagggccccccttcctcagtggtggggatgccacctgtgtgccaggtggagccgatggagccccaggcttccttccttttggccgcgcctctttctttcctccatcctctcctcctcatctgaccccccagctctggtcagttccgagtcaggcaaggggtgggcaggcgcctcgagcagagactcctccaggaacccaagcgaatgaggaacgccaggatagtgtcagcacagatgcaggtctgacccccagttcgggacagagggcggggagggtaaagggcgatggggacgcttctcaccatcgctgtccccatccagtcactggagcagcttgtggaaggtggcctcggtcggtcacgctctctgtagtggggtccagggctcagtcccaggtgctctcatggaggcacaggcagaagggggaaggggaaggtatgagccagctggtcgccagtatcagagcaccccgagtgaggggtcagtgcccggcaggagctgtgagccacatgctatctggtccagagcgaggactgctggccacctgtctgtgagtggacagagggacacagtccaaggcacagaggcagcacccggagcccacccctgcccactgcctgggcccgagacccgagacctgtgcacacagagcaggcacgcgccgaaagcctggcctgagtgagtgcccggggtgcccagcaaacacccacggaacagcctactgacggtgcatccagcctggagccccacagaggccaagcgctcagcgtggccacaccagacctgccccctgggaggtccggtgcactgtggacgtgggcagggcagagcccgggagactgcctgggccaggaggccccaggatcaggccctcactagcccgggcacctgctcagggctggtgctccctggtcctacccctggcactcaggccgtggacggccaagaggaggctgccagttgtcagctcagcatctggaatgggcctggagaaggggattgactgtgtccctgacctcagctgagtcccatgtatttctgggttctgcacacgtgacctcagtggttgaaataacaagggcagccggcagtgacttagagacacgagactggctgctaggcagcttgcaatctggtgacttcattctgggatcctgggaggagtccctgccaggcccagctcccctgtcaccctagttgccagctccagccagtggccagacagcaatcatccctgcccctccctttgcccacgtgctggtcgtccccctgtctgggacagcagctggggctgcggccagttgactggcaaagctgtgtttgacagtggaggctgggagggaatgagccagctggtcaggccagccaggtgagccctgcggggagctggacgtgtccccaaactgacaccaccgtccccaatcagcactggcaccggcttccagatgattctctggtctcaccatcttcaggaactgaggccccaccagcctcttcctgcctcatttcccaaactgccttttcattagagagtaaaaccccttgaggaccagcggatgtacggtccatggaggcctcaggtcacggtgcccacaggatttttaagttaaggtacgtacgttgtttctttagacataatgctattgcacacttagtcaactacagtagagtataaatacaacttttatgtgctgtattagtccattttcacactgccataaagaaatacccaagagtgggtaatttataaaggaaagaagtttaattgactcacagttccacatgactgggaggcctcaggaaacttacagtcatggtggaaggtgaaggggaggcctcaggaaacttacagtcctggcagaaggggaaggagaagcagcaccttcttcacaaggaggcaggagagagaagggaagagtgaagggggaagagcctcctataaaacattcagtctcgtgagaactcattcagtatcatgagaacagcatgagggaagccgccccctgatccagtcacctcccaccaggtcctgccctcaacacatggggattatgggattacaatctgagatgagatttgggtgaggacacagagccaaaccatatcatgtgcactggaaaaccaaaaaatttgtgtgactcactttattgcagtggtctggaactgaacctgtaccacctcttcagtgtgcacacacacatcacacacacatgcactcatacacttacactcacacacgtacactcacacaccacacacacatgcattgcacacatgtgcacacacactcatgcatttacatcacacacacgcaccacacacacacttgcactgcacacgtgcacattgaggcacttacatgcactcacaccacacacatacactcttgcattgcacactgcacacacacacgcactcacatgctcacatcacacttgcacgcacacccgcaaagcaccccacatggagcacagctcaagtcacagcacaggtgagggcttcagctaaagtgcaaaccgagacgggcgtggcagaggaggccatgaccatgacctgaggtctccgcggaccttacagccactggtcctttattgccaaaaaaaaaaaaaatgctagtgacttcagcaagtcataatcttcctgcgggtggagggtctcactgcgatgtggatggccgctggggctgaccagggtggtggtggcagaaggctggggcggctgtggcagtttcttaaaataagacaacaatgacatttgccacattgatagacttttcttttcacaaaagagttctctgtagcacgtggtgctgtttggtgcactttacccacagtggaacttctttcaaaactggagtcatcctctcaaactctgccacggcttggtcaactcagtgtatgaaatagtctcaatcctttgttgtcatttcagtaatgtccacggcatcttcaccaggagcagattgcatcccaagaaaccacttttttgctcatccataagaagcaactcctcactggttacattttactgtgagactgtagcaattcagtgccatcttcaggctccacttctaattcttgggtggccaggagcattgtcaactagcagcaatattttgaaaagaatctttctgagcagtaggtctcaacagtgggctttaaatattcagcaaaccatgctgtcaacagatgtgctgtcaccaggctttgttgtccacttaacggagcacaggcagagtagattgagcatcattcttaaaggccctgggattttcagaatggtgaatgaggattggcttcaactcaaagttcctggctccgttagcccctagcaagagagtcagcctgtgcttggaagcttggaagccaggcattgacttctctctagccatgcaagtcctagctggcatcttcttccagtagaaggctttcatctgcattgcaaatctcttatttaggccaagcgcggtggctcatgcctgtaatcccagcactttgggaggccgaggcaggcagattacctgaggtcaggagttcgagatgagcctggccaagatggcaaaacccagtctcaacaaaaaatacaaaaaattagctgggcgtggtggcaggtgcctgtaatcccagctgctcgggaggctgaggcaggagaatcacttgaacctgggaggtggaggttgcagtgagccaagatcatgccactgcactccagcctgggcgacagagcgagactctgtctcaaaaaaagaaaaaaaatatatcttgtttagtgcagcctccctcatcgctatcttggccagatcttctggagaacttgctgcatcttctccatcagcacttgctgcttcacctcacctgcacttttacgttatgaagacagtttctgtccttaaacttcatgaaccgacttctgctaacttggagcattttttctgctgcacctctctcagccatcatagggttaaagagagttagggtcttgctctggattaggctttggcttgagggaatattgtgtctgatttgatcttccatccagaccattaaaactttctccacatcagccatgaggctgtttcactttcttatcattcatgcgttgctggaggagcacttttaattttcttcaataatttatcctttgcattcacaacgtggctgtttgtcacaagaggctgagcttttggcctatctctgcttttgacatgccttcctcactaagcgtaatgatttctagttttataaataaagcaagagatgtccaactgttcctttcatttgaacacttagaggccattgtagggttattaattggcctaatttcaatatttctgtggctcggggaataggagggagatggggaacagccaacccgtggagcgaccagatcacacgggacatttacccactaagttcaccgtcttatacgggcgtggtttgtggtgcccaagacaactaccatggaaaccccaaagatcactgatcacagctccccatagtaatcatggtaaagttgaaatatttacagaattaccaaaatatgacacagagacataaaatgaacacacgctgttggaaaaatggcgctgatggacttgctcaacccggggttcccacagcctccacctgtgaaaaactcaggacctgcaaagcccaggtgcacctgtgcacgtgtgagtgcctgtgtgtgtggaatgtgccagggtacgtgtgtgcatgtgtgtggtgtgtgtcagtgtgcgtgtgtgcatgtgtgtggtgtgtcagtgtgcgtgtgtgcgtgtgcgtggagtgtgtcagtgtgcgtgtgtgcatgtgtggtgtgtgccagtgtgcgtgtgtgcaagtgtgagtgcctgtgcatgtccagtgtgccagtgtgtgtgtgagtgtgcttgtttgtgtgcatgcctgtgcatgtgtgtgcctgtgcgtttgtgcatgtgagtgcctgtgtgtgtgatgtgtgccagtgtgcgtgtgcatgtgtgtggtgtgtgccagtgtgcatgtgtgcatgtgagtgcctgtgcatgtggagtgtgccagtgtgcgtgtgagtgtgcttgtgtgtgtggtgtgtgccagtgtgcgtgtgtgcaagtgtgagtgtgcgtgtcgtgtgccagtgtgtgtgtgagtgtgcttgtgtgtgtgcatgcctgtgcatatatgtgtgcctgtgcgtgtgtgaatgagtgcctgtgtgtggtgtgtgccagtgtgcgtgcgtgcaagtgtgagtgcctgtgcatgtccagtgtgccagtgtgtgtgtgagtgtgcttgtgtgagtgtgcatgcctgtgtgtatgtgtgtgcctgtgtgtgtgatgggtgccagtgtgtgtgtggtatgtgtgttccagtgtgtgagagtgggggggcatgtacgtgtggaagtgtcatgcaagcatacgtgtgtgcacgtgtgagcatgcgcgtggtgtaaggagaggcgcagcatggaggcagaggcagtgctgctcacctgagcccagggacacagtgttggtctcagaagggctgccctgggtggcacctgggcccaggaccttttcgctcaggctgtgatggtgccactgcaaccggtgagaggtgtgcagcatcagccatggcgggaacagagccgtggcaggaccacacctgcagtctgcgtcctcgccccgtttccccgtgtcccagcgtgtgctgattccgaccatcagctccaaccagcagcgggctagtgtgccaggagggatcacagagccggcagcactcaggctgggcacggggccgaggggctaatgggcgaggggctgggcagggtcagctgcaggtgccccctctactgcgaagctccacctgcaccacaggcctgtttcttgtctctttcttcttttctttcctttccttttaaaaatactttctagatttaatcatttttgagtgtgcagtggaacatttaggaagatgccagacacaccagcaccgcccaggaacctgctgtcttggccggacacaccagcacagccaggaaactgtggtcacgacccgcggggcagaagcgagaaccttggggccggccccacccctggccgtgcctccctggcctggccctggggcctccttgtctttcctcccggttcaccagccaggcacacgcatccccaggcacacgcgtccccaggcacacgcgtccccaggcacacgcgtccccaggctgcactggcttcgagctgtgtgttcctggagttgttgtctcacctggtttcatagcagatttctctgatttctttccctgcacgtgtttctttaaggcccatcctgtaaccgtcggtagctggggctccccatgtccatggctgcacgggacccgcttctggcgagaccacggggctttatccctttatccctcctgccgactgtggcacgttggtctccgagggctcaggtggtctgcaggctcgtcccacccatgcggggctcagctctaagcctgctaactcctcacaagcccatccctggcaggggccccgcgagtccctctgcgcccgtccctctgcgcccgtctgtgagcattgctggctgcgccgtcctctcttgcctctgtgaagcgtgtgcaggtctcttccgctctcttctgggccgcccactcttcctcactgacgggcaggagcctgtgtttgttcctcacatcagcccgagcggcagagactttccctttcgctgagtcagctttggaacccaaagtctgtgatactggggtgcctcgtgcttctagggatggtttaaggtacccgtcctcatgccacatccacaccatgtctcctccacgaggctccccagtcaccccctgtgagcagcagcacgcccgtcctgtaactgtgtgtagctggggttcaccgcacagctggggccgcaccgccttcccgtggctgctgtggccacggtgaaagctcagtggcctaaagcaactcagggggatcatccgacagtcgagaggccgtaaggtccgaaatgggccccgctgggccgacgtcgagttgtggggaggactgcctccctccccccccccggcaccttctggggctgcctcggccaccgtcactcctgggcttggggcctcctccaccctgaaagccagcagccctgcgtcctctctccactgggatctctgccctcccttttaagaggacgccggtgatgtcagtacagccaaacaacccagggcagtctccaccattcaccgccactcacttaaccccatgtgcaaggtccctcttgacgcgtgaggtgaaaccttcactggtttcagggaagagaacgtggatgtctgggggtgttactcagccgacataggaccgagctcttgttctcctgtgcgatgctcatctacctgccccggcactgatggccgctcctccctcacttggcactgggtcacgtggtgatgcactcagggctggtcccaggctctgcaccctccccggccagcccaccctcttgggctctgcaccctccccggccaggccaccctcttgggctctgcaccctccccggctctgcaacctccccggccaagccaccctcttgggctctgcaccctccccggctctgcaccctccctggccaggccaccttccccgggctctgagcaatgtgctctgccgtgagtcagctcccgctttgcccctccggacacctctgggtcgggttcatagctcccaaggggaagctgttaggatttcaccgagattcagatccgccctccctttctagaaaccttcccccaaaggcagtggttggcctgactcgcggaaatcacgtaacccggagatgtcccagcgagtggccctggcgtgcgagccgctgccccaacgctgggcacctgggcacagaggggtggggtggccattccccgacgcccagagtctgcctggggcttagacgggattcgacgtaacagaagatgacgcttgagtgacagattcgtcagcgcccagaggaggaggacaagctggacccctaccctggttggggcttggagccataggagagggtgttcccagctgccagacgggcgggaacaactccccggacaccggtgggccgaggctgttgcgaggggcccacgtcaggcggtggatggtggatgctggacccagcggagcacccccttcccccggccccggccccggccccggccccgcgcctgcacgtccacggcggtgactgcccagcggcggcggcgagaaaagcggcggcctcccgcgccctctgccggctcaccgggaaggagcccggagccggtggtgcgccgtgggtccgtcctgcaccactcctgtgtgctgtgggtccatcctggacacttctgcgtcccctgggcccctctatctccctgtcttatcgtctactttgccgggcatccgtgtagccgctgtagctctcttaatctcacagttggcactgcatggccttttccatccagttactttcaacctacttgtgtcttatactcaaagtgtttctattctagtcaccatgttccagaagcttactatctattctgacaacctctgcctttggatcggagcttttagcttgttaaaattaattggaattttgatctggttggatttagtctacattttactgtttgttttccgtttttaccactttaagtgattgttttgctctttggaattcttccatttctcctttacttccttcttttggattattttaatatttttaaaaaatttgttttaatgtttttgtttgtttgtttgtttgagacggagtctcgttctgtcgcccaggctggagtgcagtggcgcgatctcggctcactgcaaaccccgcctcctgggttcacgccattctcctgtctcagcctcccgagtagctgggactacaggcgcccgccaccacgcccggctaatttttttttttgtattttttagtacagacggggtttcactgtgttagccaggatggtctcggtctcctgacctcgtgatctgcccacctcagcctctcaaagagcagggattacaggcgtgagccaccgtgccctgcctagtttttacctagtttcttatggttgctctaatggattaaaatccgcaacctttccacagcctatgtagagtaaaattgttctcttcatataacatatttacagaaaacttgagactatataggaccgtttcctgcctcccacctttcctcctgcagatgctgggcagagcaccatccccagtgccctccacaaggcactgctaaagttctctctttaaacagtcattgaaagagggaggaaattaagaagggggagacaaatcttttctatttatccttcagcgtttctggtgtttctccttccttccgcacagtccaagtccccccaagcagcccaggggcttcctgctgttctggtgaagtccgcagcacggaccctcggcccaaggcccaccgtgcaggtctggttggggttttccacaggtgcggtgcctgcaggagtgtctactctccctccaccctgaagaatttcatctaacatgtcctgaagtacaggtcgatacacggaaaatgctgttagttttatttttatcagaaagtatctttatttcatctttattcttgaaggatatcttcttgggatatagagtctgggaagcacaggtttcctagggagtccctgagaactaccagacacaggccaccccctcccaccactgcaccttggagcccactgaacgtgtggggcaggggtctgtggccaacccaggtgttcgcaggagccggggagacagcgtccatgggggatggtctctgagccggcccctaggtcacccatgctccgtaggggtggcagccaggggttgtctcatgggtccgggtgggggctggaggcggtgagcaagtgcacccggtccgggacacgctgcatcccgcttggatccctgggcgccctcagcaccgttgccaggccctgcagaggggaaggtcagcccctgccctgggctcgggctgtgcctgtcaggatgagactctgcccctccaaggcggggttcctcggtctgacagggagcagatacttcggccctccgaccttcttcccctgaggctgagcggggccttaaaactgtttaaaacggggcactgctggtcactggccacgcactacccgcggggaggggccatgacctggggacccggtgggacgcacagctccctgtgtgaccccacgctgccccggggagcagtcccgcctgtagccaggggctccctgcagttgcagagaagtccgcagccaacggagctctcccggggcccacccgtgaaaggacctggtcagggccctctccaggcgcagaggcccgcgggaggccagcgaggccggcactggctgctcggtcagtggtcgggggtcgggggtcgggggtcggggttcttggtctcctcctgctccgcccgcacccgctgctctcccttgccccgcggagtgggggagggacagcgctgaccccggaggatgcaggcggcgtctgcaagggggtcaacgccttcctccccggcaggttttacctcgtcagcggaggggtcccctttatcatctgtggggtcacggctgccacgaacatcaggaattacgggacagaggacgaggacacggcgtagtgagtaccgggcacccagaaccgggagctgggagcagcgggtgggctctgcctgaggtccctcccaggcacctgtggtggggaagcccaggacgaagcagcaaggcctgggcctggacctggggcttgccgagagctgcgcccctcccagctcgcacccccgaggagtgcgcagcgccccctcctctcccagggagtccaacctaatctttgcctttggacaaggcaggcctggtttgccttctatgggaggggcctggggacaaatagcgatttggcaacagcacagagctcagctgagaagggaaaccccatcgagtaggaacggcggtccagccatcagtgcccagagccagcctggaacctctcattcagggccctcagttccttctgcggccccaggatggcccgcccgtctgccctccgccttgccccgcccacccagctccacctccgcctggccccgcccacccagctccacctccgcctggccccgcccacccagctccacctccgcctggccccgcccacccagctccacctccgcctggccccgcccaccccacgctggccacgcccaccaggctccaccctctgcctggcccctcccatccagctctgccctctgctcagccccgcccaccccacttcacctcttcctggccccacccaccccacaccagccccacccacccagctctgtccttcctgcccctgcccacccagacccgccctgcacctggccccctgcctggctctgcctctacccgcacctgggacactttcctggctaccccacctcccaagctggtagggccaatagggcccggttcccatccacactctcagcgactctagaaacgcccaaggcccccaagccgcagctgtgcaaagccactcgctaggccgggtgggtgcagggccctttgctctgcagggggcgtcctgagtcctggccgtgctggccccgctgacactgacgtgcgtctccccacagctgctggatggcctgggagcccagcctgggcgccttctacggcccagccgccatcatcaccctggtcacctgtgtgtacttcctgggcacctacgtgcagctgcggcgccacccagggcgcaggtacgagctgcgcacacagcccgaggagcagcggcggctggcgacacccgagggcggccgtgggatccggccaggcaccccacccgcacacgatgcccccggcgcctccgtgctgcagaacgagcactcattccaggcacagctgcgcgccgccgccttcacgctgttcctgttcacggccacgtgggccttcggggcgctggcggtgtcacagggccacttcctggacatggtcttcagctgcctgtacggcgccttctgcgtgaccctgggactcttcgtgctcatccaccactgcgccaagcgtgaggacgtgtggcagtgctggtgggcatgctgcccgccccgcaaggacgcccaccccgcacttgacgccaacggggccgcgctgggccgcgccgcctgcctgcactcgccgggactgggccagccacggggcttcgcgcacccaccgggcccctgcaagatgaccaacctgcaggccgcgcagggccacgccagttgcctgtcaccggccaccccgtgctgcgccaagatgcactgcgagccactgacggcggacgaggcgcacgtgcacctgcaggaggagggcgccttcgggcacgacccccacctgcacgggtgccttcagggcagaactaagccgccctactttagccggcacccagcagaggagcccgagtacgcctaccacatcccatccagcctggatggcagcccccgcagctcgcgcacagacagcccccccagctctctggatggcccggcggggacacacacgctggcctgctgcacccagggcgaccccttccccatggtcacccagcccgagggcagtgatgggagccctgccctctacagctgccccacgcagccgggcagggaggcagcgctcgggcccggccacttggagatgctgcggaggacacagtccctgccctttggtggccccagccagaacgggctgcccaagggtaaattgctagaaggcctgccgtttggcaccgacgggaccggcaacatccgaacgggaccctggaaaaacgaaactactgtgtagatgggggcagaggacacggtgttcctggaggagcttcagagcagagtggggggcccatctgccacatgaggtcactgggggtaccgaagtgaccccgcctttcagaagccgttcacacccctgccccttccttgtgatcacacccctgccccttccttgtgatcacacccctgccccttccttgtgatcacacccctgccccttccttgtgaaagacctcagcggggaaacgctccgggccacgcccactccccttatcccaattccgcgtgctggtcccgcacacggtcatccggtttctgtcctgtggtctccagtcctggggcaccctagaggcagagcaggggattccatcaaaggacccactgagaccccagcatggccctgcccgagatgccctgctgcccacggagtcctggcttcccctggtgtggccgggcagggccgagatcgcaggagggggctgccctgacctttcccagtgttcaatgtgtgtgtcttgcgttctactccgggggtggcggcggcaggtctgtccccagcattctcgctctgggcagaaccctcgggaccctccgctgtcgtgtgtctgagccacccctgcagcttcacagggcccctgcacacctctgcccactcagtgtgccctgtcagccctgtccttgtcgtagccccagccctgcagggctgagagcaccacagatgctgggggctgctctggactttggggatggctgtcagcctcagagggccaatggggggctttcacgggcccaaggcttgggaaaatgcccagacatcctttagtgaagactcgacttccaaaaccagccaccgctgggactggattccactccagtataggcacttagcaacacgaaggtttattccaaaaagaaaaggggctgacagacgggagattctcatggacaaaatccctttccctttttctcgtctccatgaacatctgggtaccaagccctgactcaaaggacagatgtggatgacagcaagacttctgtgaaagcaagtggcccgtccctaggtgggagggagtccagagggtcatgggtgtgaaactgtgcacagctttccctccctccctcttcctccttgtctgtgacacatgtgcacccacacacacacacacaaacacatgtgcatatcacacacatgcacacacacaaacacatgtgcatatcacacacgcgcacacacccaaacacgtgcatatcacacacatgcacacacacaaacacgtgcatatcacacacatgcacacaaacgtgcatatcacacacacgcacacacacccaaacacgtgcatatcacacacacgcacacacacaaacacgtgcatatcacacacaaacacacgtgcacacatacttaacacacacttgcacctgctgtgcacatgtgcacacacacgtagtagtgtgttttccagccacccacacactgggtttgcattggagattgtttcaccctgcaaacgtcaacgtcagcagactcgtcggtgcgctgtgctatccggttgggaggtctcaccaggagcagagcctccctaacgtgcacctccgagaagaggggtgtcggggagtgttcccagcacctgctcggtggaagggctctccggagactggcactcagtatctgagtatgaggagcctcacttcccggggtgtcggtaaacttgaccgtgactcagtaacccacagcgtgctcctcccagcaaaccccgtgtgtccttacaggtcgaccagacgggccgtcggaggaccaccaggtggctctgcctctgcctcaccttctcacctgcttccatagctgatgtgaacccgaatccccacgctgtgctgtgtacgcactgtaggtgcagaaccgtccacacaaaaatacagtcttggcattgtttgttctttgtgaggctggttaatagcatccccgtgtgtttttctcaccctcgatggggtagaggggcacctgaatgtgtggcccccgtctgtgtcctggatcctggggcagggctgctctccctggcccctgcagcccctcatgaactttccaccctcagtgcccccggctgagcagagaggcgtcccaccattcaaccaaagaaagtcaacattgaacattaaacctctgtgtgtttctatactgacttagcctcatgagtccacttgggactggtgttgggccatatccaattgcacgtaacgttttggagcataaacatccacagcccaaccaccctgaggggctcctggctcggagtcagcttccaccagaccatgaagccagagccagaccctgcgttccgcacctgactttcgtgccacttccttccttgtgtgtgcccgtgtgtctgcatgtcggatgcaacggagcgtgggtgcatgccagcctgtgtgagtgtgcttgcctgtgtgcctccgtgtcagacgtgctggagcgtgggtgcatgccggcctgtgcgagtgtgcccctgtgcctgcgtgttggatgcaatggagcgtgggtgcatgccggcctgtgtgagtgtgcttgcccgtgtgcctgcgtgtcagacgcactggagcgtgggtgtatgccggcctgtgcgagtgtgcccgtgtgcctgcgtgtcggatgcaatggagcgtgcgtgcatgccggcctgtgtgagcgtgcttgcccgtgtgcctgtgtgtcggatgcaatggagtgtgcgtgcatgctggcctgtgcgagtgtgcctgtgtgcctgtgtgtgtgtgagtccgtgtgcctgcgtgtcggatgcgatggagtgtgcgtgtatgctggcctgtgtgagtgtgcttgcctgtgtgcctgtgtgtttgtgagtggcttgtgggttgtgtgggtgttgacgtgttagtgtgtgagagtgtgcgcctgtgtggtgtgtaggtccctctgtgggagttgtgtgcacacatgcacgtgtgcttgagggtaagtgtgcatgtgtgtgcatgctctttggaggaacactgtgaggcggcccctccgccctgtctccgtgcgggtgtgtaactaccacacggcaacactgtggtgactttagtcagcttaaaggactaggaagcagaagctgcctgtgcctccagaccctgacagttcttctctggagcagtcctagctgaggaggcctccagtcctgggagacacacagtggcatctgccgcgtcgcccacgaaggccccagacagggctcagatctggtcggcctgctctgtctctgaatgagccacccctgcaggggctttgggcagctgaggagcccccactggttctgcggggaaggggctgggttggggcccgcacgttccacctgcctgagcaggactgaggagggatgcaggctgaatgggagcactgggcccctgggagggccttggcagaaggcagctcagcagccacacgctaggctgcagtgtcgcccatcagtgacagcagctgcaggaagcctgtctagggaccctggaaggagctcagggccctgcactgatgtggtgaatgccccccatgtgcagagactggctgcaacgggcacttccacacctacccagtgcccagatggtgcctgaccggtcctgccacttgctccctgacccttggtgcttgcatttctcgggggacgctgtcgggaccagca

SEQ ID NO: 14 - DNA, 83991 bp, Homo sapiens
  source 1..83991: mol_type = genomic DNA
ctggggccagacctcgaggctgcctgggcccagctccctgctctgcctacaaggctgtgcaggaaggacgccaggaggggactgcagagcagtgaccgaccttgtcttgccagccagctgggcctgggcagcaggaagcggcaagtcccgtgggcgggcgaccggcatttgtgcggtcagcagagcggaggcatccccaccaggaggccgggtggcctgggggagggggactggctacagctcccctccctcctgcacaggctcaactgctgggtgggatggacggcctggccagaggccttgggggtggtgaggagactgaggtctgtaggcagaaggaacttgccaaggtccacagcgaggtggatgcccgctgggcccagggcagccccggatccagggccttcactgtacctctgctcacccgtggcgctgtgagtgggcagtcactcaacctgggccctctcctggagctgggaggtgtctcctggtggcacaaatttagggtcagcctggggctcacgtatgggttctccgacccactcactgtgacgggtaaattatggattctctctgtgtctcagttttcccatcatgaatgataggaagtaatgctagccttgcagaggaagggcagaggtgaggtggctcctggtggctccatcccccctccatccctccccaggccctgtgcctgtagctttagggcacgagggcacacgtgggagggccgaaagagagcttcctggcaggagcaccagctgggcacaggctgctggaggctgcagagggcagtcttgggggggcaccaaatctgaactcccctcaccccaaagatccagtcattgctattgaggctctgcacccccttcctgctctccaagcctttagaaagggctcgggggccagacgggaggctggggaatggcccgagtaacctttctcctgtgctccgggcccacttcccttcccacggggtttgcagaatcttcctgggaaggaggaaggttagagaggagggaccaaggtcagcaggaaagacagagcctgagagagctacaccctccactcacagaggggcagccacgcagagcgtggtgagcgagtgggcaggcaggccagggcccccgggagccacgccaggctgcgtgggcaaaggggtaccaccaaaagccccaggtggactgccagcccctccctgctcaggcttgggtggaggcggaggtactttgttccccaagctgggccgctgcccctgcaggtggtcacattggtgagtggcagacagacaggtggacggagcaggtgcctgggagggtgccagggcctgtgtctgcggcccaaagtcctcctgccctcgttggtagcaggctaagctgcctcctctgagagagcccacccccatgcccagagcccacgtctccccaagtgctcactctgaccctctgctctttctcttccagctgctgctggtggccacaggctggcaccagggccctggactttagaagccgttgctgccctctctgtcacctgaagcggggccctctcccatcccacccttgccccgcctccctgcccccaccgggccggccctgcccgccgccggaccctggcatgtcaagacctggtccgcgcctgcctgcccagcccgcggaaccccggcggccccgcgagctaggatgaggggccaggccgccgccccgggccccgtctggatcctcgccccgctgctactgctgctgctgctgctgggacgccgcgcgcgggcggccgccggagcagacgcggggcccgggcccgagccgtgcgccacgctggtgcagggaaagttcttcggctacttctccgcggccgccgtgttcccggccaacgcctcgcgctgctcctggacgctacgcaacccggacccgcggcgctacactctctacatgaaggtggccaaggcgcccgtgccctgcagcggccccggccgcgtgcgcacctaccagttcgactccttcctcgagtccacgcgcacctacctgggcgtggagagcttcgacgaggtgctgcggctctgcgacccctccgcacccctggccttcctgcaggccagcaagcagttcctgcagatgcggcgccagcagccgccccagcacgacgggctccggccccgggccgggccgccgggccccaccgacgacttctccgtggagtacctggtggtggggaaccgcaaccccagccgtgccgcctgccagatgctgtgccgctggctggacgcgtgtctggccggtagtcgcagctcgcacccctgcgggatcatgcagaccccctgcgcctgcctgggcggcgaggcgggcggccctgccgcgggacccctggccccccgcggggatgtctgcttgagagatgcggtggctggtggccctgaaaactgcctcaccagcctgacccaggaccggggcgggcacggcgccacaggtgagtgactggcggggaaaccttcggacaggggaggtgggcagacaggggaggcgggcagacaggggaggcgggcggatgggggaagtgggcggacagaggaggtgggcgggcaggcggaggtgggtgggtaggggaggtggaccggggtcttcttccgcagggctgccctgctagcaccgctgtctggagagtgtgtaccctggcaccctcccaggcgcctgctccatccacccgtgcacagagtaagagtgaaggtcactgcaggtgtgcagggccagcccgggcacacggcgggtgctggttgagcattgaaggcctaattccctccaggatgggaaagggtcatcctcctggctgggagagggcccgccctttctctccggcaggacaactttaatgggccagaggctgcagcggcctggggctggggactgcaggagcctctggggctggatgatggtcctggggactcgggctgcgtggaagggtcggcaggtgggctctgtggagacgtggtcagatgaggtttcgggttgagtatgctctcggtggatgaatcacctctgccacacgctctaggtgctggggccacggctgcagcagtgaaaaccctccagagccctgctctcaggcagctgcgtaagggagagaggaaggccctaagcacgaagacacgagcagccaggcctcaggcagcaatgagagccttgcactagaaccgggcagggctggcccctcatggcagggttgccattgtacctggaggtcagggaggctgcgaggacgagggaccttgttcaaagctctgcgagaggtgggggaacctcatgccaggaagagagaacggcaagtggcgagtcctgggtggctttgtgcccggagagcacagaggggcaggggccagtcctgtggggctgccagcctctgggacactggcttttcctgctcatgagacaggagcgtgcgcaggagcagcgtcctcggggtagagccctgtggaggccccgtgggcctcagtgcaggagatgggtcccgtacacacctagggcatggagaccccttgctgacgggtgacgtgcaagaaagagaaggaagcccagggttttggtgttagcatctgggaagattgggggattggaggggtttgagtttgcaatgccaggcaggggctgactgcatacatcgggtgttcgggggtgaggctgggctgtatactcaaggctggagggccatcttggggcaatgggacccttaggggtacccaggggccttgacttttctggggccagtgaagcctatggactcctcagaattttgtgtttaaaggcacaaaataggctacgcagggctacagaggaagccatttatgctggagcatggttctacccacaacacggggccatggatcccagataagaagcctctgtgaggccgtgagtggggctagagaggggccagaggaaggagggacaggcgtgaggcttggcccagccctccagtggcccgaggaggagggaggcagcgcccctgggcagtggggggccaggaagccaagtggtcatgctgtgtcaggacaggtgggcacctcagctgcgtcaggtgccgccagcggctgggtgggaggggctgaggaccaagcccccaccaggcagagtggaggtcactgtggccttggtgagggcggcttctgtggtgtggcagggatgagtgtcagggggactggggagagaacgaagtagatatggagggctctttcagggagtagagatggggtggtggacggtttgggaggtgggaggctgcaggaggactgggcccagcggtcacaggcacacctggccgtgcatcttggtctgccactcctggtcacttcacccctcagagccttggttccttccttggcagaataccaactcctttgcagagcgttttcctccagttgatgggtctcaggggcccggcccaagattacacccactactgaagagctggtcgttagcagcatcagggggcagcagctctgccattcctaatagtgctcggaacagcgtggagcttgttggaaagagctggcgggacagacgcatgtgacgcgtggagaggctggggcactgtgtgacgtgggtgtcggagggagcgctgagcttcactcctcactgggcacctactgagtgcaggcaccctatggtgtaaggtggtcgggcctcccgtgggagatcccacgttatcttgggaacccaagggccttagcagggctttgggcagaagagccagatggttgggctgtgagtgcagaagagatgtcagccctgaggggaagcctgggacgggctggcagccggtgccggcattcaggaggggactgccactggcctggtcaggacgctgcagcagcagtgggagggaagaggagggccttggggtgcagctgatgatcgacttactgatgaaaggatgtggacatgggcagggaacccctcccaggtgtcccgccagaaatgaggatgtcagctgagttgaggaagtggggctgggggttgcagaggagaagaagatctggaggtcagagtgggacttgagtgtgagctgcctgtgaggtagccagctggcagtgtcatgtgaacaggcagctctgacaactggagcaccaggacagggccagggtggggcaatggatgcttgaaaatagcttctgagccacttttgcagagccccagggcctgggttcaaatcccagcctgacccggcttgccgtatgtccctgggccaattccatcaggtctctcatcccctcaggcccctcatctttaaaacaggaagggtaaaaatatcttgtttcttagattgccctgatgaatgagaactggggtgaagtgtttctaagcagaagcgatgttgacgatgaaatatcaatatgctcgcgtattcttaggcagggagactctagagggctcagggagcagagacagactggaggcagggatattcgagcagcttgaggtgtgcacggagattctgagaaagggaatgtttggaggtggtgctcagaaagaggtgggaggatgtgtgttcacgcatgcattcatgcaagtgtgttgtgtgtgcgtgttcatgcatgtgcgtgtgcaagtgtggcatgtgcacgtttgcatgcatggcatacatgtgtgcatatgtgctcatgcatatatgtggtgtgggtgcccccatgtaagtgtgggtgcgtgtgtgtgtgtgtgtgcgtgtgcagtacattactcatgtgcgtgtgtgtgtgacatgcatgcacggtgtgaatgtatgtatccaggctgggctctgtgcagcgatttttgacagaacacaggtaaaggctgtggggcaggggccgttggtcttgtggaaagacggctagagggcatattgactcggctgctggcaacatgaagcagggagcttgtcatcttgtgcaggatggggtggaatgtcgtctcctaggcccagagacagttcggaccctagtgcccacgctctgtgcccagaaggccctgatgcttccaggaccacagcagcaaaagtgatctcagtagtaatagtcatttattgagtgtttactttgtgccagaggcacctgcacgggagataggctcctgtggaggcacgctctgcctcagggccttcacacagctgttccctctgccaggaagtcttccctagagacccgcagggctcccgccttccagtcctcacgcacatgtgacctttcattgcaggctaccctgaccgtcctgttgaaaatggcagcagctctgggcccactctctgaccctttatcctgcctctgtctctgcacacatgtgtcacctctcaacacactgcataatttcccttatttgttgtgtccacttctgattgtccaggccaggatgtaagcagcacaaagcaggcattgccagttccctgacgtgccccccaacgtgtagaacagtacctgggagcagcaggcactcagtcagtccaagttggagaaaaccaggcacagacatgttaaggcagcagccagggccacacagcttgtaagtggcaggctgatggcagagccccttgacgctgccatcgagtggtaacactagggcgtctgcagtgagctctgctcagagctgtgcgtgtgtgcatgtgtgtgcatgcgtgcatgtgtgtgtgtgtgcatgtgtgtgaatgtgtgcacatgtgcatgtgtgaatgtgtgtgcatatctgtgaatgtgaatgtgtgcacacatgcatgtgtgtgaatgtgtgtgcacgtgcaggtgagtgaatgtgtgtgcacgcgtgcatgtgtgaatgtaaatgtgtgcacatgcatgtgtgtgaatgtgggagtgtctatgtgcacgtgcatgtgtgtgaatgtgggagtgtgtatgtgcacatgcagatgtgaatgtgagtgtgtgcacgtgtgaatgagtgtgtgcacgtgcgtgaatgtgtgtatgcacgtgcatgtgtgagtgtgtatgcacgtgcatgtgtgaatgtgtgtgtatgcacgtgcatgtgtgaatgtgagtgtatgcacgtgcatgtgtgtgaatgtgtgtgcatgtgtgcatgtgtgaatgtgtgtgtgcacgtgcatgtgtgtgtatgcacgtgcatgtgtgtatgtgcacgtgcgtgtgaacgcaagtgcgtgtgtgtgcacgtgaatgtgtgtgaatgtgtgcgtgcctgtgtgtgaatgtgagtgcatgcacatgcatgtgtgtgaatgtgtgagtgcctgtgtgaatgtatgtgtgtatgtctctgtgtgtgcacgtgcgtgtgcgtgggggggatggggtggcatgaggaccagagaggcaggtgaccattcagaagacacacagctgagcagaggcagagttgaccccagatcctgccagctgagacctgtgcccagggagcgttgtgccctcgctgtgggacctggggacactgggacaggcttgtccatccgtccatgtccctagcaggcaacacacagccaagtgcaggagcaagcaggcagcccaggccagcccgtggcccattttcagccctgccccccgcacggcctgtccaagtgccacatggccacgtcacgcgtcagactctgcaaacactcctcaggccaagcaactgttcccctccacctcgtgctgccccacgccccaccgccccccaggctgtcaggcccctctcctgccggctctctctggctctcatcacttcctccccactgcctccctttgcatttttccgcctagggtgagtggggccgtttctctcaagggttgttttaaatattcatgttttaattaaagaattttattgcacgagcgacatggaagatcatgaaaaagcagcgtcctggggcctgggagcaagtgtgtgtgtcctcgtgtgtgtgtgtgtccctatgtgtccccgtgtggtgtgtgtggagccattttttgcacaaggagggacaggggagccactccttttgcacaagggccaatttagtgtatgtgtccctgtgtgtgtgtccctctgtggtgtgtgtccctgtgtgtgtgtgtccctgcttccctgtgtgtggtctgtgtgcctgtgtgtcctcgagtgtatatccctgtgtgtccctgtgtgcgtcctctgtgtgcccacagggagtgggtatgggaggctgggctggaactgggtgtggagtgtgaacccacacattccgttgggctcctggatcctgcaggggtgtgggaggcttactgctggccgaggggctgtgaccggccacggagatggggtgacctccccctccctgccctgcctccagggtgagtcaggctcagcccaggcccacctgcccagtgaccccacactcactctggaggctgttggagacacagtcaggctcagccccaaccccaggagccccggaagtcctgggaagaggcatctggaggcctgtctggggtgtgcaggggcagagggagcggcaaagcctgggctggaatttggagaggagtcaggattggagtggagtttgggactccaggtagtctcatggtgacagggagcaccgaggggcttgggaaggtgccaaggtctccactgtcaggggtttctggcttggacaggagagccactctttttgcacaagggccaatttagaaaaatctagaaaacaagaaggcttcagtccccatcacagacaacacccatttcagatggggatggcaggatggggccccatgggaatgatatgctgggcccaccatgccttcagcccttcacctcctccgctcagagccagaacgcaccccacgcccgcctggctgcgagagaggctgagaatcagggcactgtattttggttccacttcccagaaagatggggagaaaggacatggagctggcagcagacaaccggggtcggggcccgggcggtgggcagagacttgtccaaggtctccgggatgggccctgggctttcaggcttgtaaacagggcaccattctcaggccaaggagcacctgcctgatcaagaaaaggaagcaacaagactcggccagctcagggagcctcagtttccctcctgagagttagagacgggacagtacctgctagcagggcctacgtgaggctttaaggagatggaggcttgacaggtttcggggagccccgctgccccacgaggctcctcgctcttagctcacctgggaagtggcctgccggatggtggacttggcttctcagccccatcctgagatctgctggtgcccgcctctgtggcgggaggaagggggaccagccacttgggcacctccagtaggagcggctggcagcaggtgggctaagtcaggccaccaggcgccccatccaccctccggggccctcccttccacgtccgtgcagggggccctggtctaggtctcagaggagtctgggtgccccaggacaaaccctaacttggagcctgggctggaggtggggtcatccctcggacacgctgtgggtgcctgggacctggtggcagagcagggtgggaatggcagaactgactgaccctccagccccggtgctgcccgacctgctggagtcgggagacctctgctggcaacagacagaagtgcacagctctcctccagagaacagcccggaagctagggaggcccagctggagggagggacgccccctgtgctcccccgcacccccatcccagccaactcggggtgcgggctgtggggagctcacagcctccagtctggggcgccagggtgggaaggacaccaggaggcctctcaccaagcaccctctcccctgggtggccaggctgcctggggccgttaattggctctattcatccccttaatgagatggaaatgaggcttccagacagagccggcattgagtgggggaagaaaggcggtttctttccggtcctggaggggcggcccaccccccagcctgcttgctgctcctctgctgcccttcactgtccacccagctcagacacactgtggccacccagtgaagcgtggcttgaacacctctgcaccctgcactgcggaccccaggggctccatcctggcattgatacattcactagacaaacatttactgagtgtcagctaagtgaggggacacacatcaaaaacaaaacaagaataaaaatagcagctaccattttctcagtgttcattagtagcaggagtgtgaccaagatgggggatcagtctgtggctgggatcagggctcagtatataacaggatcaggaattctgtgcccaagatcagaggtcagtctgtgataaggatcaaggctcaatatgtgaccagggtcaggaatcagtgtgtgactagaatcgagactcagtatgcgtccagggtcagcttgtgacctggatcagggctcagcacgggtccaaagtcagggttcagtatgtgaccagggtcaggcttggtttgtgggggcagggtgatccatcctctgggccagtgtcccgcccctccgaagcctctcctgatgtgcccccgccctttctccccctaccacatcctcaccacctgggtcaccaaggtaaccagccctgaaatgagtgggtgttttggcagctgaggcctaacctgggtctctcctgaaaggctgcgtgctgcagcagttgccatgggaaccgagtggcatcctccgatgagcctggcttggacaccctctctctcccgcccactgccagtttccacgtcactcaggcttccgcatgggggctgggctgggacggcgaggggggtgccgcaggacgtgccaccctgacccattgtcaggcccgccccttaggaccccgtctgtgcctttgcctcagaatcggggtggtgggatgccttcagcagatgagaccactgaggcccggagcacctgggccccagacagtcctggcaggaggccttagtctgggggatgggggcgtttggaatctgaccaccagttcaagtccaggttcctctccttgtcctgagttagggcatgtgacagggcagccacgaagggcctgtcacctgttcctatgctgtgggcaggtgccaccctgtcccgcccttgtgccctggaggccgtgctgagtcccccacctctcctggcatggcacgggctaagcacgctatggaggaggcagctcaactgctgtgcaccctcagccaggtgctctcctctctgggacctgtgggagtatggctctgtgagtgaaggaagagggttctgcagcaggtgtgggggcctggaagactcctcccaccctatggaccccaccagggagaaaatgaggcctcccacagctgtggtgggtcaagtccctctcctgggtctcatccccatgcccctggcaccccctgctggccattcctggcataggtgtggggaagtggggcagggtggggggcactctggctggacactgagtttgctgaaaatcaaagtggggccccgggagtcaactctgacccaagtgacaatgccacacgccgtcctctcatatccttttttgctgtttgacttcccacttgtcagtcctgggaggtcagccattatcctcatgttgtaaatgatgggagtgaggccagtgggtggtggggccactgggggaatctggcagctggagctaccctggggtctcctgcagtccacactcccactgagggaggcagggcccctttcctgaggctccaagaggccctggggcccttctggtgggtcggggtggcctgtgcttggcctgattgctgcccctggggcctcccctgctgtacctgggatcgagctgccggatccccagtgttccccagtggcagcggccccagctccatggtgggtcccctcgtggtggccgccagctgtctcctcgccaccgtagccaggagcagcacttggcaagggctgcatgccctttccaagtcgcccgaccctgctgcacagggtgtacatgagcccagagtgctgggcaggaggcccgagcgggaggcctggacgcggcagccccttcccggccccctggtgctgctgcccctctctggcccacagatggcagtggccctctcctgctttgtgctcctccatggctacccagtgctccaggaccatgggcactccaagcagcccaaagtgtttttggcagcacgaggaccccccgggagcagagactcctggggcgtgaggtctggtttgctaggggaacacaggtccatgaaggccgcggggactgtcggggcagggatggagaaagactcactagagaagctgaacagagcggccggggtcagggcaggggcgtggcggggaggcgcctgcaggcatttatcccaggctccctcctcgggtggccagctggccaggtccagggcaggctccgtcaggctgtgccctgggttcgaggccctggttggacaccaggtgtgaggccttgatcaccactggtatacctgcgtggggtgaagaagcggctccaggtcacagctggggtgtgaaatgtggagccctggtgatgagggtggtgaccctccgctgagcccatgaggaaactgaggctctgatgagcagggcctggccagaaactggacggagcctggagagggcttccaggcgtgccaggaaccagagccttggaggccaggcccctctaccctctgcttaccatcaggacgctgtgctctgaggcagccctctggtgggcggaggtcgtcatcccttcatcatcctggcggcaaacctgcccagtggcggctggcacacggggacccttcaggctcagacgtgacctgagctctccagagggggcccgggagctgggtagacaccagacccccaggtcctcccaggccaggccttccccggcactgcggcccctccccacccgggccggcctcggcgggcttagcacccccatgacttacccgtccaggccacgagcccctgccctgccctgatccccgccctctggtttccccccaggcggctggaagctgtggtccctgtggggcgaatgcacgcgggactgcgggggaggcctccagacgcggacgcgcacctgcctgcccgcgccgggcgtggagggcggcggctgcgagggggtgctggaggagggtcgccagtgcaaccgcgaggcctgcggccgtgagtgcgggcggggcggggcggagccggagccctggagaggcggggcctgtgagggaggagaggggggtggggccctggagaggaggggcccgtgggggcggggcggggcctcgagcagaaggggccggtggagggaggggcttgggggcgggaccaggtaggggcggggccggggccggggcctggcagacgctgggcggggcctgcaggaagagtgaatagggtgggtctgggctctgagaagcaggacctaaactcggggctggcccgtgggagtggggcctagccgggggagcagaggtgagggccccgaagagggtggtgcttggggctgggtgggactagttggggctttcttccggtttgtggattggggtttttggagggtgtgcggaaggctggctgtgggacctctggccaagccagcccgcctgccccagccggatactgcctccagaatgtatttctgtaataaggctctctaatgaccccatgcattttttagctgcttccatgaagttaaatcacgttgtaatgagactgtcattgtttgggctgttttttccttggtgaactttcctggggagaagagctcctctcaggagcctggggagggccccggggcatcggctgggctgcggaagggaggcagggggctgttggggtgccaggcacgggagagcagccgtcctgcaggtgaacgctggcctgtgggcggtggaggcagtgagggaggtggcgcggggtatgggagacaggacccacaggaagggtcccctggtgaccagatgagggctggtgccaggctgggcactctggtccctggctcccagctgcccagtggagccaggtggcccagtgctgccgaactcagagcactgtggccacagagagagaggacgggggcaaagaaccgctcctgtgctgacctaagcccgtcctgcagccgctgggcgcaccagctcccggagccagtccctgcggtccacagatgcccggcggcgcgaggagctgggggacgagctgcagcagtttgggttcccagccccccagaccggtgagctggcgggaggggggtgggtgggactagggctttgggaaaatactgtaagttatcaattgcagctagttatgggtagtaacttgaataacatgccataactagactaaacccttaggtgcagggctcttgtctcctgactgcctggcattaggggaactggtgtgaggtgaagaaacgtgtccctggccagaccccagaggcccagggatggcacaggccggccctcagggctcccagccttgtaggggaaatggccagttcttgagatcagcctggttcgaaggcccgggggctctgccccagccccgctgcctgctccccagcagggcagccctcctgctgcggggtctggccccggtctgactgcagccccatgggcggcaggcctgtgacgctgtagtggggcctgcaggtgacccagcagccgaggagtggtccccgtggagcgtgtgctccagcacctgcggcgagggctggcagacccgcacgcgcttctgcgtgtcctcctcctacagcacgcagtgcagcggacccctgcgcgagcagcggctgtgcaacaactctgccgtgtgcccaggtgggtgggaccttgggctggggcagcggacagccagggcagcggggggccagggcagcgggggcggtggccgcagtgggcagcagcaccttccgtccctctgcagtgcatggtgcctgggatgagtggtcgccctggagcctctgctccagcacctgtggccgtggctttcgggatcgcacgcgcacctgcaggcccccccagtttgggggcaacccctgtgagggccctgagaagcaaaccaagttctgcaacattgccctgtgccctggtaggtgagagggagggcgtaggggcagggaggaagggaagaaaggggaggtcacagtgggccaccggccaggcccaggagcccagctttgcccactccagacccacctcagggtgctcagaggttggaacctcagactgggtttaggaagcagactgaggtgtgaccttggggcatttcccacccatatcccaggctgggtgtggggtggtgacctctagggttttctcacccatatcccaggctggatgttcatgccatgtcccaggctgggtgtggggtggtggcccccagggttttcacacccatgtcccaggctgggtgtggggtggtggccccagggtgttctcacccatgtcacaggctgggtgtggggtggtggcccccagggtgttctcacccatgtcacaggctggatgtggggtggtggcccccagggtttactcacccgtgtcccagcctgggtgttctcacccatgtcacaggctggccgtgggtggtggcccccagggtgttctcatctatgtcccaggctgggtgtggggtggtagcacccagggtgctcacacccacattccaagccaggcattggggtgccgggtgttcacgcccactttgtgtctccttcctcccccgggccgggcagtggatggaaactggaatgagtggtcgagctggagcgcctgctccgccagctgctcccagggccgacagcagcgcacgcgtgaatgcaacgggccttcctacgggggtgcggagtgccagggccactgggtggagacccgagactgcttcctgcagcagtgcccaggtcaggggtgcgccaggctggggtcggggggcacctaacaagcaggagcctctaggaaggggacaggccccacagcgggtgggggtaaccatgggccccggcatgtgactgaggagggagtggggtgcacagtggggtctggggtggctgtgggggaaacggagcatggggtggctgcagggtgagtgaggtgcactgtggggtgtggggtggccatgaggagagtggggcatggggtggccatggggagaggagtggggtgcacagtgggacttggggtgtccatggggaagtggagggtggggtggctgtggggtagcagggtgcacagtgggacttggggtgtttctgggggaagttgagtgtggccatggggtagcggggtgcacagtgggacttggggtgtctgtggagaagtggagtgtggggtgactgtggagtagtggggtgcacagtgggacttggggtgtccatggggaagtggagtgtggggtggccatggagtagtggggtgcacagtgggacttggggtatccatggggaagtggagtgtggggtggccatggattagtggagtgcacagtgggacttggggtgtctgtggagaagcagagtgtggggtggccgtggagtagcggggtgcacagtgggacttggggtgtctgtggggaagtggagtgtggggtggccgtggggtagtagggtgcacagtgaggtgtggagggtggtggggttggctgcatgtggggtgtttgctttattttgtatcaggctgatgactgatttctcctctcctggtctgaatttcccttctttgacctcctgccccacattcctgggtccctatgtttcactgccgcatggctctgtgtgggtccctgtctttgtgtcctcctgtcactgtggctcctggaccctgcccttcttgtcgcctgtgccctgtgtctggccacgccccgcagtggatggcaagtggcaggcctgggcgtcatggggcagttgcagcgtcacgtgtggggctggcagccagcgacgggagcgtgtctgctctgggcccttcttcgggggagcagcctgccagggcccccaggatgagtaccggcagtgcggcacccagcggtgtcccggtgaggcccctcctacctgggctgggctctggggagggctgatggcgattgggcgggcttgggctcagctgtcacccacgtggtgtgttgggggctcccgtcctgtcctcataatgatgcctgctccaggcgccttgcaccttccagagccagctgccggctctcagtaccccttcctgaacccctgtcccgggccccttggcagagccccatgagatctgtgatgaggacaactttggtgctgtgatctggaaggagaccccagcgggagaggtggctgctgtccggtgtccccgcaacgccacaggtgagggctggagagcacgtggtgtatgggggctcccgtcctgtcctcacggtgatgcccacgctgaggtgctgtcagcactgggaggcggcccagacacggagcccagacagcctgcgtgtgctggcgcggggtggtggggccgcgagcccagggcaccgtgtgagaactctgtggcagctgctgttctgagcactcgctaggggctggcacccatgctcagccctaacgcaagatgtccacggagtctaagcaacccaagaagccgccaccatttacagctgggaaactgaggcacagggaagtgaatgcccttgcccggggcttgcggggacaggaagaggaggtctctgttgaatgccagcctcaaggagaaagcagggctccacggggaagggctcgctgcactaggggcaggcctcctttgctcctcctttttgaaggagtgcaggtgctttatgtccctgacaggcagcaggcagagaggatgggagcctgggttcaaactctggttctgcccttgtttgctgtgtgacattcagaaactgccttaacctccctgagcctcagtgttctcatctgtaggatgagggcagttggggttcctctgctcagagctgctgtggggaggtgtgggggacggtggcaggggccctgtgttgccagctgcggctgctgctcctccctcgctcttctgattacagaacagggcatgttctcggtagcagattgcaaatgctgagaagcaaaaagaagcacgtgaatgccgcacggtggcgtgcctcccctggcctttggtctgcatgcgtggcagggtctcccagtgccgctcatttttggccccatctaaaccagcatctgcatccagtcctgtggctcttgtcaggtgtcagggctgcgacagttctttgtggctgccgccaccctgtaaacactcagctgtccctgtttctctgatgatgtcctgggagtgagctctgtatcacagggtgtgccgtgtttaaggctgttgtccccttaatgcccagcagcaccccaaggctgcccccatgtctctgggccaggctgaggcccctgtagccctgtggatgcagccaggcaggggcccagggtgctggctccctccagggctctgggttggttagaaggggctccgaaggaggtcatggctgaactctgaaggccctgctcggccgagatctccacctccatgcagtggggttcctgaaggcttagctcctgccaggtcctgagtccttggggcaggtagcagctggaaatgtgttgatgaagggaacgaggtccctgcgtggactctgctctcggcgtgaggccatgggcgagtccctgtttctgggggccacagggtcccttccagaaggtctgctgccaggggccaagggtgggattcctgggccaggcagcgggcatccacctgagaaggggatggtctccccaggactcatcctgcgacggtgtgagctggacgaggaaggcatcgcctactgggagccccccacctacatccgctgtgtttccattgactacagaaacatccagatgatggtgagggccagttcccgggggtctccaacccctccccaatcaccctggccacacaggttgggaccctgcagagggtcctaggcatgggagatcctgggtggctgcctggacatgttccacagaggtgaaggcacccgccctctctgtcttccgcagacccgggagcacctggccaaggctcagcgagggctgcctggggagggggtctcggaggtcatccagacactggtggagatctctcaggacgggaccagctacagtggggacctgctgtccaccatcgatgtcctgaggaacatgacagagattttccggagagcgtactacagccccacccctggggacgtacaggtgggctccccgagcggcattttggaagagggtgtcgggaaggtgtctggggagccctcctcgaccttagagatggatccccaaccctggccacagcccaggccctaacccatgtcataggttgaactctgacctttgtcacacatttaatcttggtcacacattgagccctgaccctggtcacacactgagccctgatcataggctgagccctgaccctggtcacatgctgagctctggtcataagctgagccctgatcctggtcacacactgagctctggtcacacactgagccctgaccctggtcacacactgagccctgatcataggctgagccctgaccctggtcacatgctgagccccaaccctggtcacacaccatgtcctgatcctggtcacactctgagtcctgacccttgtcacaaactgagccctgatcctgatcatacactgagccctgaccctggtcacactgagccctgatcctggtcacacactgagccctgatcctggtcacacactgagccctgaccctggtcacactgagccttgatcctgatcacacactgagccctgatcctggtcacactgagccctgatcctggtcacattctgagccctgatcctggtcacacactgagccctgaccctggtcacactgagccctgattctggttacactcagaaccctgacactggtcacccactgaaccctgaccttggtcacctgctgaaccctgaccttggtcacatgctgaaccctgatcctggtcacacgctgagccctgaccctggtcacactgagccctgatcctggtcacacactgagccctgatcctggtcatgctgagccctgatcctggtcacacactgagccctgaccctcgtcacatgctgaaccctgaccctcgtcacatgctgagtcctgatcctggtcacacgctgagcctcgatcctggtcacacagtgaaccctggccctggtcacacactgagccctgatcataggctgagccctgaccctggtcacacgctgagctctggtcataagctgagccctgatcctggtcacacgctgagctctggtcacacgctgagccctgaccctggtcacatgctgagccctaatcctggtcacgcactgagccccaaccctggtcacacaccatgtcctgatcctggtcacactctgagtcctgacccttgtcacaaactgagccctgatcctgatcatacactgagccctgaccctggtcacactgagcccagatcctggtcacacactgagccctgattctggtcacacactgagccctgaccctggtcacactgagccctgatcctggttacactcagaaccctgacactggtcacccactgaaccctgaccttggtcacctgctgaaccctgaccttggtcacatgctgaaccctgatcctggtcacacgctgagccctgaccctggtcacactgagccctgaccctggtcacacactgagccctgaccctggtcgcactgagccctgaccctggtcacacactgagccctgatcctggtcacactgagccctgatactggtcacacactgagccctgacactggtcacatgctgaaccctgaccctggtcacactgagccctgaccctggtcacacgctgagccctgaccctggtcacaccctgagccctgacactggtcacatgctgagtcctgaccctggtcacatgctgagtcctgaccctggtcacacactgagcctcaatcctggttacatgctgaaccctggccctggtcacacactgagccctggccttggtcacatgctgagcctcaatcctagtcacacactgagccctggccctggtcacaccctgagcccttatcctggtcacactgagccctgatcctggtcacacactgagccctgaccctggtcacactgagccctgatcctggtcacacactgagccctgacactgcactggtcacatgctgaaccctgaccctggtcacatgctgaaccctgaccctggtcacatgctgagccctgaccctggtcacacactgagcctcgatcctggttacacactgaaccctggctctggtcacagtgagctctgaccctggtcacacactgagccctgatcctggtcacatattcagccctgaccctggtcacacactgaatcctgaccctggtcacagtgaacggtgattttgtgccctgttctctgtcactggcccttcttcctcttctttccagaactttgtccagatccttagcaacctgttggcagaggagaatcgggacaagtgggaggaggcccagctggtagggcctggggcccctacggtcagcagcctcaggaggggtgcaggcacagctggtgcctccctggtctccagtcggcctggggtggggtcccgccgggtgctctgggtttggatctcaggatggtctcttgctggtgttggcagcactgaggaagctcagcattcctagcctgtttcctcatttgtctaaggacagtcatttatttcctggggctcagtgaggaggttccagaaaatactgagcacatggggatgccaaggcagctgggacatagagccctcctcatgttggggcagtgggcagtgctcactcccccaggctgacctccagccagccaccactcctagcccgggcagcacccggcatgggggctgtgggtatccagagactttccccaatcctgggcttcccatgggtggggcacagcagcccctctgggcatctgctttctcatccccaaagtggggtactcagaggtcaccagccccacttcctcaaaatgttaggaaatggccaataagaaaaggagggacagggaagggaaggaggcaggggctaagggacagtggggcctcctccctcggctgctcacccccctgccctccaggcgggccccaacgccaaggagctgttccggctggtggaggactttgtggacgtcatcggcttccgcatgaaggacctgagggatgcataccaggtgacagacaacctgggtaagcctgcccgcctgctgccaccccccatgccttgctttgcagccctgggccaggcccttctgcctcagcatcctcatctgtataaaggggcagtgaccagacagcctttgtgggccctcccagccgatttctcagatgggtcctgttttcagtctcctgagggttgatgatgtggcctaggaggggatgagacacagcccacggggtgtggacctgggagctccgtccccaaccagcgcttcgcatgtacccacctggggccagagcgtattctgcctgtcacccccagtgccctccctgtggagctttagaggcaggggctgtgcaagccacactttccctgcttgtcagtcccagtagtgccttgccagaggggcctggactccacccagctccgtggtgtcagccgagtcttagtttcctcatttctaaaatgagatgataacggtgcccatctcatggggaggtagagactgatgagacgagtgagtggctgaatcccggggtaaaaggtggctgtcattacaaacacagcaattctatttaatgactgttactacagtgccctcaaatatctctcaaaagccacgtttctcaaactttccctgccttgatcagagagtctctcaaagcagaggacccaggagtgggtgctggccccagctgtgatccctgctactagggaggccgaggtgggaggatcgcttgagcccaggagtttgagaccagcctgggcagcacagtgagaccctgtctctacaaatgttttttaaaaaattagcaccaaggagggagagtgtcacctcccctgtggggatgcttcacctttagtgatatgaccaggatcagctgagctttgtcagcacacacaccctggggccttgcccagtgcctatactggtgcccaggacgtaactggtagccagctcccagagcactcggcacagcccacagcccctggaatggcccacacacgcttcaaaccctgagcaccgtggttaccccacatgcttcataaccctgtctcagtccatttcctgttgctgtcactgaaggggtaatctataaagatgagaggttctggaggccggaaagtccaagatcacagctccagctctgagtgagcaccctcctgctgcagcacagcatggcagaggcagcccatgagagacagagcaagtatgcccgctgaggtctcccttcccataataccactaaagccatcatgggggccaccctcgccctcccaaaggccccaccaccaagtaccattagcagatgaaattggggattcaatttccaacacgtgaacgtttacaggacacattcaagctatagcacaccacagacaccctgtgcatcccatatgctccactcagctgtgctcagcctcactcactcccaggaccctgcttctctgcccaggcccccacccctacatccctccctcactcagctgccaagaactggacgccagcaagagcggcttcccatcgcatctgtttatgcaaaccagatgaaaggaataatccctcccgactgtcagagctgtaggccaaagtgacacagaagctgcatgtagacagactatgaaggctcgaactctgatccctgcagccaaccttaaacccagagacctgccatgaccgggttgatgacccagtgttttcaccagtagaaatgtccatttcaatattcatctcggcacaaggtgcttggcactcccgaggtgtcccatccccaggcctaaaacagacacagtccgaggatatttaagttaagcaaccctaacttccacgtgaccagacctgtactgcaggcggcattcagacgtgtctggtggaaaccatagcttcgtgcctattgtacttgaacaagtcccactaaaacatgtccaagacggatcgacattcttattataatgtctttgggaggctaactagcattaaccttttaaattaaagactgaggttaggcacagcggctcacgcctgtaatcccagcagttcaggaggccaaggcaggaggatcgcttgagcccaggagtttgagaccagcctgggcagcacagtgggaccctgtctctacaaatgtttttaaaaaaattagccaggcatggtggtgcacctttagtccctgctactagggaggctgaggtgggaggatcgcttgagcccaggaggtcgaggctgcagtgagttgtgatcacaccactgcacttcagcctgagcaataggctgtctctttaaagaacaaaaaaagacaaagttctgatttttccatagtgaaatgcctcagctagaaacatcaacacgactgattgctactacttcaataattctgccacttttcatcttgttccaatgaaatatttcaaagtttgccccttacccgggcacacctgccacagcccaccctggtgcccatgccagccctccaccgcccctcgatgaccctgtgtccagcctcccaccccttcgcctgctccagggtgctgctccagcgtccgtctgcccccattccccgctgcagcttcccagcagccccttgcccctgcaggccacctgccctttgacatttcttcttgtcctcacccccggttctctgatggtccctcctgcccctccgctcactgggtgctgacccagtccgaattccctctgccctccactggggctgccagtgacatccatggtgcaaaaccctgttctcgggcatccgtgccgcccactgcatttggcgctactgatgcgcatgccctctcctcctctccctgccgcatcttgggctgcattcttgaggctccactggggcctgtgagggctgaggccacggccccagggccaggttcccccagaacagtgggtccctgtcagcacctgcttccaccccagcggcacttccccaaactctcttcccgtccagttgccccaaacctgctgcctcgtccccacgtccatttgcccctaaacgtgctgcctcatccccatgcccatccaccctgagctcagggcccttccgcacccccaatgccttccttcccagaatgggagggaacactggatcccttctttcaccgtggcccatactgccctttgatgcctgagccctgaggcagggcagcccccatcccccttctacagagggaggggaggcgggatcagctcacagagctggagggcagctgggctcccctgtcccaggagggagtggggggcgctgaggaggtgcctggtgcctgcggatccctccatggccacaggacagaccccagaatctgcctttgaccaccttctgggccatggagggtgggaggggcaggctccctgcccctcaccgaggctccaattcagcaggaccaggaccggcccagcctctgcctggtgctccttgctgtctctgctcctggacctcaccgaggttctgggggctggggctggggcagatggcccccacactcctgcctctgagccatgggcaccccgcggcatcagcctgcactgccaggcctgcacctcaactcccgcagctgaggccccgccacatctgtgactttccctcctctctgtctctcccgcctttgaccctgctcccagttctcagcatccataagctcccagccagcggagccactgacatcagcttccccatgaagggctggcgggccacgggtgactgggccaaggtgccagaggacagggtcactgtgtccaagagtgtcttctccacggggctgacaggtgaggggcccagggagtggagggggaccttcatgggggacgtgggccccagagtcggacggtcaccacccttctggagtctagctgctgcctcagagttgggcggttctcaagggggtcctcttttccaggaagccctccttgccctctctggggccagggcctgcggatcaaccctgaggcccaggcagaggggtcaagatgaaccaccttgcttcagggagggacagggagtcacgtgtcaaggaccctgttacctggaagagagccatgtcctgcctgcccgtagctctcaggatgccccagggaatggcccggtctccctcttcccacgtggctgttgccccagctccctggctgcagcactgtgtccgtgggtgggtgggcctcaccatccgccagggccctggacgcgaccttgaagatgggcggcagatgccagtgacagcggggtccaggccaggctgccaagtcccaccctggctgtggggatggcgggccggggttgacagtgcactttcttccagaggccgatgaagcatccgtgtttgtggtgggcaccgtgctctacaggaacctgggcagcttcctggccctgcagaggtggggagccctgggcaggtggggtgggcagtgcagggcaggtggggtgggcaggaccccagccacaggatgtgaagggggaggccagggggcctggaggagtgtggatgatgggctgtggagggtggcggcgggtacaggggccctcgggggcacctggggaagggccaggaggagcctgggctgggagggctcccccgacacctgtgcctctggctcttgcaggaacacgaccgtcctgaattctaaggtgatctccgtgactgtgaaacccccgcctcgctccctgcgcacacccttggagatcgagtttgcccacatgtataatgtgagtgccgtccacgtgcacactctgatgccagcagaaacgcgtgtgcgcgaattctgtcccactcctcagccactaagcctttggggcctcctcacaacagctttaaccttcgagagctacttttatccctggattacaggtggggaaacaggctcagagaggtgcggtgacttgcccggggtcacacagcaagtgaggtgccgaaaccccatctgtgcctgactccccacctgggctccaaccactctgccctccagcccccattggcctggtcattccgcttctgagaagtggagcccgtcccatgacttctggccccctaacgcctggccaccaagaagctgggggtgtaagtacaccctctgccggcaccgccaggactgacaccaggcctcgcctgcaggggccctgggatttcagcacgggagcgtccccccagaactccctggcgggaagccccagcctccaggccacggctgctatgtgagccctgccaggtcccaaccctgctccttggagctctccagagcccttccttgggcctcagaggagtaggggccgagatgcccttctgatgggccgagaaccagggcccccagggaacacgttgcctgggttaccgcaccaggactgggcagtgccaggcctccagcccaggccagggctgtaggaagccacgggagaacccagccctgtcctttctagctgtgtgaccttgggagagttgttcagcctctccgtgccatggttccctcccttatcaagtgggaacaatagggctgggtgaggactgagtctcacagctgctcagagcaggccacacctgagagccaccctcaggagctgtggccatctctgctgtcactgccccatcttggcagtgctagtgtgtggcaggcctggcaaggctgtgtcccaggaatgctagcaggacgtcagagcagtgcagggtgcttacagaggccactgtgtgcccggtgacccctgctcactaggccccgggggaagggtcttcccatcaccctacttcataccagagacggacttcagccattgctgcccagcctggccactggacctgggctctgggaggggccaggagctgcccgaggccacatgggtggtgggggcttgtgccaagcccaggtgaccttgggccactgctgtctccaccctggactcagtttcctcctcgcaaaacgcagtctgttcagggacccgcacaggtagcatgcctggtagcacacctttaggtgggtcccatggtgacccgagggtgggggctggtcctggctgccaggggccctgactcctctcccctctctcccagggcaccaccaaccagacctgtatcctgtgggatgagacggatgtgtaagttcacttggatttcatggccgtgggggtctggggtggggttcgtgggaggctggcccagtaggggaggggtgcaggtttcaggtcttgtccacttgccccccagctgtctgtgtacccgcatgggcctccgtgtcaccacctgtcactcactgtctggctctggagcccaccaggccgcctcccaccccctcccagggatgtccacagttcagggaggagcggacgtggaggtccaaccacaggccaggtgatgggcaggcgtcctggcctgccacctgcccccagcccccagccccatgcccacagcaggtggaatcctgacattcaggtctgcaggtgggtgccaggcactgaggggctgcgaaagcttccatgacagaccagggcagcatggagtggaactggaacttcaggctcatcagatgggggcgtgggcccctggggtcttcagtggccatatatcctgtgccagttgcaggccaagcacttgttgggtgccggctggcccaggcgctgtggcacagctggagcaagttccacgccccatgtggggttccgcaaggagcagtcaggctgtggggtgccatctcggggccctggtgggtgtgccagagtggggccatcctcccagacagcaaggtgggggcagcgaagagaagctcgcccagtcacaggaagagtctgtgtaaaggcccaaagtgccagcgcccagggctgagctaggccaggacgtggggagatggatagagcgatggcggccgggtcccaacatgcggctccggcctgaggggtcctcagtgtgtggtcggggacctgggtgtgtgcaccctgccgcccgcctcctccgagcgtgttcctccggctccctcagccccagtccctcctggctgctctgacatcaccagcctcaggcctccctgcacccctttcccgggccgagtgtgtgcggtcagcatggccacctgggtgccggtggcacttgtgatggtcccttgcgtggtgggtagttcagtgacaagggaaggctctgtgagtggcaggcgttggaggacaaggctgcctgacagggagagggaggcaggtggctcaggaggagacagctggagcaagggcagggaggctgagggcatgaggagcagggagccggccaggaggagcaggcagaggcaggcaggggctcaggggaggccgcggcagggtgaggacagttagtgggggctgggtgtcatgactctccacctacccaccacccatccaccctctcctctgtctgcctgttctttaatctatacccactgccaccaccctccacccaccaaccatcaaccctctccttcgtccacctgttctttaatctatatccactgccaccaccttctacccaccacccatccaccgctcctccgtccgcctgttctttaatccatccgcccatcgcccactgctcaccacccttcctccggcggtcactaccctctgatgggcactattctggcaggtcccagcctttagcctcctctccccagtgaggagggatggggaacagggacagacggagcagtgtggtgatgcccggccgtgcatgggccgggaagggaagctagcagggtctggatgcgggtggggaggggcctttgcaagcagggtcatgcacgcctccgagggaaggggaggtttcggcagaggcctggcaagcacagctctgcgtgtgagtgtctggggatgagcgtcgcaggggaaggagcagccggggcaaaggcctcaaggtgggattggcaggtcacaccaggctcctgccttctctgcaccccacatggtggactctgctatgtttcctgccctgggtctggggttggcagctgggctggggaaagctgggtgccctgcagccctggggagccagctctctagctctcgtaagggtggaaaaagaaaatgcaagaagaaagcccccctgcttgcatgacccaggcccacccctgggctttgcattttcagggggtggcagtgcgggggctgcaggtgggtctctcacccccacagccccagcacttccaccagcacaggcccctccccacagtgcagaaaccctccatccgggctgttcgccggccgcggcagctctcggggggctgcgccctggttcactcaaccagcccctgctggtggccttcaggagccttccctctctaccagcataaatgccagcgtgaccagcgatcttgcgaggacagcttcacccgtacttctgattgctccctggggatcagtccccaggcagtcttgtcaggtggagggtgtgggcccctggggggcctgcagagtaaattgctttttagaaaggaaagcatcccctttgtcctccagggcagcaggctgtgaggggcctgtccagtgagccgggacaaggacactgccccagggacccaactgtggccgaagaggacatgctgcgtggccttgggcagagcctgtgccctgggagccttggcttcctgaccctatggccagggtctgcctgcttttaggcaggggcgggggcagcaggacggcggtcaagtccccagggtgtttggcgtccgcgtggcctctgtcgaccctaaaagtcacaggtgtggggaaggcccaggacccgccagtcacaccaggtgttccacccaccccgtcaccggctgggtgcgctgagtgctaaggtcttggtgcctgggtccaggacttcaggacaggaggacaggaggcaggtgccggtgtggcccacgcagtgcctggcagcattgtgcccaagttgcctcttgggtccttgaccctgcccggcagccaggccacgctgcacacctgctgcctgtgaggagctgaggccctgagactcctacagtcccgctgaaagcacagcgcagtgatcgaggccttctgctctggaactgggcagcctggagccctagagggcgggccacggctggcagggaaggactgggactgacctcggtccccttccttctgcccctcacctcccctccactctgagttggatggcacctcccttgactgctgcaggggccactcctcgccctgtgaactgtctccggggagctgagtttcccagttgacctgaagtggagaccacgggcaggggcccaggtctgtttccaccagggcaccaagggaccgggtccaagctggtgtgggcctgtgtcggtgtgcacttggatgggaaagagtctcatgcgtctggggaggggttctgtgtgtgaggagcacagtggtttgtggcgggaggggagtgagagccatcagtcaccatcagctgagaagtagtgaactcttagagctgtaatcattattcagaactgaactggtcacagatagagcccagatcccaaactcagactgagtttttaccctgttcacacactgagttctgatcctactcactcactgagccctgatcctggtcataggctgagccctgatcctagtcacatactaagccctgatcctggtcacaggctgagccctggcccagttcatacattgagcccagatcttagccacacatagtcctgaccttggtcatacactgggccctgatcctggtcacaggctgagtcctgctctggtgtcttagctggaatgacttgtgtgtgtcacatgcttgtagggccacctcctcttccagccacatacagcaactgaccatgtgacccactcagcctagaaagacttacaggcttccactgcaatgcaagtcacctgcctgcctcaccccggttgtgcagacacacttgcacccatgggctcaacactcaagcccatgatgtctgctcatgctctgtaaaccctgagccctaagagcacctggtgtccctgcaccccagcaactagatccgtaaccaaaccccaacctcccaggcccaaacaccctgggtcatccagtcctgaacgctggcctggcagcatggctcaggtgctcctgctcccccacacccctgcaccagcctggcttgtagtgctgagggcctggggaatggggatgctagggaggaaaatggggagcaaagcggggggtgggggttgcagagttctcatatgtttcaagccatagacactgcccctaccgtagcccatccctgtatagttccttgaccacaggtgtctctactggagtggggtggagggcggggacagtggcagttatgtcaaagtcatgtctgtatccctagaattgagccctgacccagtgagaatcaacagtggtttatgagcaaggcagtgattacgtggctgaatgcagaaatggatgtgcgaaggggttcttggtaggcagtgtggacaagcgggggtgtggataatctgtgggagccggctgtttgccagagggatgcacccagggtgcagctgtgggttgctgggggatggggaggcagcggaagaacagtctcatggctgggtgagtgaccagtgatggctggcatgggaaagggtgggtgggcggactgtggatgacagcatgcatggaaggctagagacaggggtggatggatgggtgactgagagaaggaaagaagatggaaggtgtctggaaggatagagattcagtttcccagggctgccctaacaaactgccaaaattaccacaaaccaggtggtttaaaacaacagatatctattatctcccagttctggaggccagaatcttgaaatcaaagtgttagtagggccatgctccttccaaaggctctaggaaagattccttccttgcctcttccagcttctggtggctctaggaaatccttggtgttccttggcttgtggcggcgtcactccagtctctgctgctgtcttttcctggccttctgtcttgtgtatctctgtactttcctcttcttgtaaggaccccaataatggatctgtgcccccccgccaaacccagtgtggtatcagtcaagatccataactcaattacatctacaaaaaccatgtttccaaataaaatcatattcgtaggttctgggggttaggacttggacatatattggggagaagtggatgatggatggatggatgagtagatgggtgggtggatgagtgcatgagtgggtgggcgggtgggtggatggataggtgggtgggtggatgggtggatggatacgtgggtggctggatggatgtgtaaatggtagatagatggatgagtgaataggtgaatgggtggatggataggtgggtgtgtgaatgactggatgtgtggatagaggtatggatggatgggtgggtggctggctggatgtatagatggtagatgggtggacgggtgaataggtgtgtgggtgggtgggtggatgggtgcgtgaatgactgaatgtgtggatggaggtatgggtggatggatagatgggtggctggctggatgtagagatggtagatgggtggatgggtgaatagatgggtgggtagatgggtgtgtgggtggctggatgtgcagatggaggtatggatgggtgggtggctggctggatgtgtagatggatagatgggtgaataggtgggtggataggtgtgtgggtgactggatgtgtgaatggaggtatggacggctgggtgggtggctggatacatgagtggatgagtgaatgatgggtggagaaaaggatgggctggtgggtgacaggaagttgatggaggccagtagcacacattgggagttaggttctgtggtcctgaaaggacagctccctgggtgttttacacgtaagagttgcaaatatctttcagtcttttaaaactgctttaaaaaatgtaaataacccagagtttaccgagtataaaagtcagagctagcaagatcctgaaagatcatgcactctgtctttactcgaagcgtggttcagtggagtcccagagcggggatgttagtacaagccgggccacagacctgaagcccttaccatgctaccctagcgtttatggggtgttctgccagaagccagcccatcctcatggctttaggaagggcagcgttccgtgtgctcccaagtccgtattgaccataatgacctgagaagtcctgcaggagactcctgtccaactgggctgggagtttcccaactttgctggctctcagaacccttattctgccagacatggtcccctcctggtaggcgtgtgtggaaggaggacgtgtgagaggcacatttgctggactcctttcctgaagctcagcctcaggccaggcaccatgagagctgcctcactcagtgcacacaggctgtctcagctcacacgtctttattaaccgattttacagctgaggagactgaggcccagagtgctcactggcagatccagggccacctcatggttgttcccatctggcctgtgcgggcctccagccctgcctcctgtggggcccctgtcaggttcagctgtcctggctcgggacccagaccctggtccctccctgggacccctgcccaagcgagcatcctggtccctttaagagcctctccctcacccacccctttcctggtttccttggagagggcagtgagggggcaggccaaggggggggaagcggaaggaagacttggcagggtccccgggtcgctgtcagcagccggttcccagctcagtctctcccacgccggccggttcctgatgggggcagaggaggctgggggaggggtgcagggggaggggacgcacccaacacagaggcctctttggtggcctgggaagagcctcagtatctgcaccatgattgaggagggaggaggaggatgagcctctcccagcttgggtggggcctcggggacaggggagaggtggagtgctgctctcaaagatgagcccaccctggcctagcttctgcccctgcagcagcttgggcctggcaccagccccttcccgggtacccctttctctgaatgtcctcttggttggtccttgggtaggggcagcaggggctggcagaggcctgtgtgggcctgttctttctgggcgcagggtccttgcccatgcaggggctcgtggcagctttcagagctggagggaatggaccaggtcgtaaggtcacggctgcgggcaagcccccatggcctgaacttcgagtgggctagcctcctcccagtccaggacagacccttgggcctgcccaaggtctctgcatctgggaatggacccagctcttctgcctggcccaggggcctctcagctgcccttacccaggccctcttactcccccacagggcctgcttgggaactctgggaccccatctgtccctgcccagtgccctcttctccacgtgctccaggctgtctctgcccactgccctgcccccctacccctgtctctttcttcctggcagcggctccgatctgcagtgaatccttggatccgtgtgtgttcgatccaccctaccccagcagagcagaagcccccgagggcagggcctggatctctgccatggctccaggcacacagcacccctcaggaggagtttgttcagggagtctgagtgtgccccgtgttaacagggtcactccctctctggagctgggggcttccacattcattggctcacacactcaggctgcccaggacgcagctgtgagttgccccgggtgcctgcttgggcctctgtgtcctgagggctgggggcgtgcaagtcttatagttggggctggcagccagggcagcccctccctcaagcacagaattcgtagatctggccacactggctgtgcgcgcccaggcctcagtttccttaactgtgcaatgggacaggagatgagggaccactatattgagagtctgtgccctcctcccagtccagggagcttcctgggcaactggagaccaccagccaccagcaagggcccagggccgctgcacctcccctgcctaccactccccgcacacctcccgcctgcccacccctcccctgcccacactacccctcctgcctccattctttttcttctatagaaagtctgccagatgcatggcctgtgacagcccccatgtggcatagctgggaggggcttcggcagtggaggaggggacaggtgggcataacagacccgctagtctgcctgccagacctctgtgccactgcctccccggggccccagcctctctctccctctcttgggagcttggctgtggctcccaggcctgccccaaccacaggctgctaggcctttgctcacccctttcctggtgggcagtgctatccatcccccaccaaccccagctgtgccaagtgggggagcccgtgggctgcgaatgcccactccaggcaggcccctcactggcacccacacacagggtagcttggcagttgggaggggcagagctccagccctgttcctcactggcggggaggctgtgggtgactttctccagccccggccctgttcctcactggcagggtggttatgggtgacttccccctcctctagtcttggctcccgtgtctttaaagccaggctgctgtgagtattacggaacgagagttgggctgctcagcaggtgggcaccgtcctaccctccaagtccaggacggcttctgagaggatggcaggcagccgctcaaaagagcgccacccttgggggccggagacttggggtacggccacccgcgtgctgggattcggggccagttctgggagtgggcttcctagaggaagggagggagcatgcaccggctatgaagagggagctggagtccacgccaggccccaggcgcctcaaaggcccagaggcggagtgccgcggtgggagcgctgcctgcgaggtgtctgtgagaggtggggttgggagcggctggggtgggtggggctgctcaggccctgggcctccgggggccccttgcctgcgtccccatgccgccttttagaagcagacagggtgagctctctggccctgaaggtgagcagagatggaatagctgggggtagcgggggcgtgcaaggagagggccgccacttcctgggtgcctgctcggtgccgggccttctgccaggagcttggaagagccagacaggcccagacctggaccagaagctggcactcagaatggggtcacagcaggcttatgggttgggcccaagtggagcgacccctcaatgcccacccggttcctttgcacccagatggccctggcagccatctcagccggccctagtcctggagccctgcctgtagggctggctcctgggccatgtctgagcctccctcagcacggacaggtctgcgactggggcccccagggcttctcacgttcctcacaatgcaagacgccagtcccatggctgccgtccggcgctgcctgggatcggggcaggcaggctggacatttgtgtttcgcccccgccccacaccgctcctccacttccccccgcgccgctcctccacctccccacgcgccgctcctccacctccccacgcgccgctcctccacctccccacgcgccgctcctccacctccccacgcgccgctcctcccccgccccccgcgccgctcctcccccgccccccgcgcctttcctcccctgccccccgcgccgctcctcccccgccccctacaccgctcctccaccacccccccatgccctcctccaccttgggagctcctctcagtcatgcctcgtgggggcgagggcatgtggaggggcggctgcaggggtccaggccacggggatgggcctggaaggccgtgagcctcttccgctcagcacccgtgtccctgtccccaggagcacaatggctcatttaaggcagcagaaaaggcttcatcaaagccccaccttcccaggcccctcagtgttaccctgaggtcagagagggagggtggtgactgactgactgttctgaaggatgtgggaaggcaggatatgaggtagacaaagggaaggacttccacgtgagcaaggagggcagagtggccctgagtgtccattctctgaccttgcccttggtgcacaggtgcctggaagcagggggatggtggaacaatctggaggtcaccagagatgactgcagggagtggggtcagcctggagatccctggagggcaggggtgtcaggtgtgacaggcagtggtgatggcgtggatgccctgttgctggtgatggtggtggccgtccctcctgccagcctggttctgcttgcactgcgccttggacatggtgagcacgggataaacacttgttgtcgaatgctggtgactgttaccaggctagtgtcagttccagggacagtgacggagctggttctgatgaggcgatggcagtgttggagacgagaatgatgatgtgcttatagtggaggtgacgctggtgaccatgggtgaccggtggtcattgtgatgactgtgaagggacagtaaaggtgacggttgtggtgacagtggtggtaatgactgtgctgttaatggcagtggtggtggtggtggtgatgatggaggtgatggtagtgatgcagtcatcactgtggttttgatgatgacggtggtggtggtggtcgtggtcatagtgatggtggtggtagtgatggttgtgtggttttgatgatggaggtggggtggtggtggtgatgatggggtggtggtagtgatgtttgtgtggttttgacgatggaggtggggtggtggtggtgatgatggggtggtggtagtgatgtttgtgtggttttgacgatggaggtggggtggtggtggtgatggtgatgtggtggtggtggtgatggtggtggcggtgatggcgatggtggggtggtggtagtgatgactgtgtggttttgacgatggaggtggggtggtggtggtgatgatggggtggtggtagtgatgtttgtgtggttttgacgatggaggtggggtggtggtggtgatggtgagggtgatgtggtggtggtgatggtggtggcggtgatggcaatggtggggtggtggtagggatggctgtgtggttttgatgatggaggtggggtggtggtggtgatgatggggtggtggtattgatgtttgtgtggttttgacgatggaggtggggtggtggtggtgatggtgagggtgatgtggtggtgatggtggtggcggtgatggcgatggcggggtggtggtagtgatggctgtgtggttttgatgatggaggtagggtggtggtggtgatgatgggatggtgatagtgatggttgtgtggttttgatgacagtggtggtggtgatggtggtcggggtgggggtgatgatggggttgtggtagtaatggttgcgtgattttgatgacggaggtgaggtggtgggggtgattatggagtggtggtggtgatgatggggtggtggtagtaatggttgcgtggttttgatgatgacagtggaggtggtggtggtggtgatggtgatagtggtgatggtgatggtggtggtgctggtggtgatgatggggtggcggtaatgattgtgtggttttgattatgacagtggtgatggtgatggtggggtagtgatggtgatggtggtggtgatggggaggtggtagtaatggttgcgtggttttgatgatgacagtggtggtgatggtggtggtggtggtggtgatggtggtggtggtggtagtggtggtgatgatggggtggtgcagtcatcactgtggttttgatgatgacagtggtgatgatggggtggcgttagtgatggttgtgtggttttgaggatggaggcagaggtggtggtggtggtggtgataggatggtggttcagtcatcactgtggttttgatgatggggtggtggctgtagtgaagatggggacggtgacggtggtgatggtggtgatggtgatggtggtagtaagggtcgcattgttggtagtgtatggttttggtgctgatgatggggttggtagtggtggtggttgtgatatagtggcagaaagagtggtatttatgatgttgatggtgtcatggatggtggtgaaggtgtggtagcaatggttgtgttgttgatgatgacagagtgggtgttgctgctgttggtggtagtgacagtactgttgatggcatgatgctgatggtcgtgtcttgaggtgatgattgtggtgtgatgaaggcggatggtattgttggtagtggtggtgagacctggtggtaatgatggtgttgataacacatggagggggtggtggcgatggtgacagtggtggtcctggttgtattgtagatggtgttgatagtgattggcctcagtggtagctatgagggtggaggctgtggtgacaagtggtggtggtggtaggcccagctcttaggtgaatttgcagcccaagccccctgagggaagcgagaccccccatgacacagttaaggaaccagagcccagcagccatgcagatggcaggccaggtgggtgaggaaatggcgggagagccaagggagcgcttccgaggtcatggcggtctgggaggagatgaggctgggctggctgtaatggggggaaggtttgggatctgctagagccagggcagagctcgtgggggtgcccagtgcccagtacagggcctggcacaggccaggccagggaggcacctgctgagtgagtgagagactgtgctggccctttgaccttgccactgggtaccaatggctggagcgtaaaagggtgtgaggtctgggcagtggccccctgccagcaggggtaggtgacaggccaggcagagcagggctgcaggtgcagcaggtgcgggtctgcatgaggcaagacggctcgggcaggcttctgagtgccagcctcctgctggggaggggcagcaggtgcgggtctgcaggaccccagccctcctgctccaggtcacttctctgccaggctgggcagccagcaccctgccctcttcaggagctccattctgcctggcagacagcctggggcctctgtgcctctgcccaggtggataagtaggtcaggagaagagctgctggaccctggggagggctgggtttccagcccaggggtatcccatggccaggagccctgactcagtgtggcggcgccaggtgggagccaggagattggcatcttgcatcgtgaggaacatgagaagccctggaggccctggatgtggacctgtcggtgctgagggaggctcagacatgggcagctctgggagaagcccaggagccagcctcatagacagggcaccaagcctgagcaggctccagcgtcatctggcaagctgggttcagtaagacccaggtcaggcaggtgttcaaatgccaaggtcgatgggtcacagcgaccaggatctcctcaggaccccaggtaattgcccccaggccctgagcttggaggggctagagctgacccaggcctgccctggagagcctcacagactggcagccagacaggggctgggcatggagtgggagtcaaggaggcttcttaggggaggcagtggctccaggagccctggagggggaggctaatcacacaggatgcggggcctgtggccaggggaccagccaggaccagggcctggaggcagcagagggcgtgtgtttgctgggttacctgctgggctggcctgtgcaggcagggccaccaggggcaggcccaccagaggcagggccaccagggccaagggaggcccctctgggatggtcgcggggggctctggctgctgggtgaggcagaacacagggaggggagcccagcacagcggtggggaagggtctggctgagggtcaggagcaatgcccaggagctcatggaagggcaggggggaagtctggttatccaggtagacttcctggaggaggacacaatgccagtcttgatctatggccaagaagtcaatgggcagaggtgggagccaggcactcctgatggatgaagcatgactaaggggcttgtacctaggggtgatcgagccgcgtgttggtttaaggggcactggggaggccagcccattaaggctcctgaggccaggcctagaagccgaagcctctgcctgcagagacaccatttccactccctgcctagcgcctgaactcccccactgcggtgtgctgtgcccactcctggcttctttctgttatgtgggaggacaccctgtgagtcattcacactagagtgtgaattagcccatcaaatccaaggggaccccgacagcgcacagtcccataatagcacctgcttcgtgggccggcaggaggcatcgtgaatgcagtgaaggctctggcttggtgggtgggtgggtgggtgggctcttagagcgccctccccgtcactgtccccttgtgtcccatgaatgagtaggccctgtgcgggcactgtgcctctgccatcccatggacaggtgcggggtgaggatctgggcacatttcacaggaggaagctgagctccgagggtgagaatagagctggctgctggaccccctgccgggctggacaagcatcgtctaggcgcttgccgggggtgcagggcaggggccccaagagcacaggagccacagtgggctctcccaaggcctcctacctgccccggactcagtggaggtgcctgtgggggctgcccgagcagggctgggcccaggtccttccccatagccagctggggaggccttctctgagctgccctcccctgggagatggggacaaggttgtggccctgcactggggctgagggcgacgtgaggtggggatccacactgggttgggagctgtctgggagctgcggccattgctgggtttggaggggtctgctgggagccgtggttactgacgggactgtggcagaggagagagttgggaggttgggtgagggaggttggggccagtccctgcgggccctgggagcactgtggcctttgctctgagtgaagagggaaccgctggagggctctaagctgagggccatgcggcctgacatatttcaaatgactggtgccctgggaagccaggcgaaggagggcaaggggcggcggccacagtagccaggggcacgggtggtggctgtggagggtgggcactgtggggctctccatgcattttcagataaaggctggtgggattagctggtgggcagctgcagggaggtgggggaggtgaagcggggacccaaggctccgggtgagcgatggcaggctggccgtgccctccccattcattcacgcgcaggcgtcctggctgtgcgccctaccttagtggcgcctgtgggcgcctgtgggactgtcatgcaccagaatgtgtccctggggccacatgtgtgagcagcgtgctgactgagcacctgggcgaccccgaggtggagtaaacagaaccagaacttgtcccttgggtttcttggcacggaggtccttggcgaccttggcaggagccgagtgggaggagtcccaatggtggcggtcactggtggtctgcagaggggtgggcagtggctggacctgtcatggggccctatctaaggggaaaggcacagccctgccctgggattcctgtctgagggtcccaggtcgctctaggtccccactcctcttgggcaggaaggggacctgctgtagcaaggcccctgctcagctggtcctgggtggtgtcactgccccagctcctgctctcaccctggacacatgggggtggggagcaggtgtaactgacccagattcctcaggcctgggctcaggaggggacctcgctctgtgacccagatattccaagtttctgtagctgacgagaggtggcaaatggtctcccacgtgcgggagcagtcgctgtgtgcgaggagggaatgacttgcctgtttgcagagatgggaacaggtgccccctgcagcaggaaggatttcagtcagactttcgggggaacttccagatgttgtaagtcaggatctggtacaagaggatgcgtcccagagattttgttgaaagagggaggtctgaggctttgccaccttgcctaagtcgacatgcatccaagatgcacacaagggcctcagttcagggcccagccctccatctgtcctgctaaaggccagtccttgactgaggtctagtgcagcaagggaggctcgggtaactcccaggaaacctgcattggctgagtttatttcctggctcaggatgggtctcaggttgcccctgacggtcccttgcagacctgcatttcagtcaaggttcagatgttgcaggccctgggtgggagggggcaggcagccagacacataaaaactggattccaggcccactgctgtcttgctgtgtgaacttggacaatcgctgcttccctgagccttggtttctttatttacaaagctgacctaagggttcctgcagaaatcaaatgataaactgccagaaagcccttagcacagagtagaagccattatcgtggaggtgcagggaagggtgaggagaagggtccctgtccctgggctgtgtgttgggaggctgttcccctgacacatgctgccaaggcctgtggagccaggaggacggaggaggtagagaggctgaggagggcacctgcactgcaggcctgcagggtcccagtgaaccccaccccaggatccaggcccttacagaatggccgggagcttcctgcttccagagctgccagcctgaccagctagctctctggaccaggggcaggtgcctccttgggccttccatggcctgaccctcagcagagtaggcagcagcccgtctctctccctgcccccagaggccgataaacgactcagcacccacagcaggagccctgggggccgggtgctggctcccaggctggccttctcccaggcagtggtggacagctgtcggcctggcgccctgcagactggccagtgcggctgggaaccagccaggctgctggccccagccagcccggctccctgcaccctcgaagtgctcccagcaaccctcaggcagttgagcagagggctgaggttgtgctgtgcctggcctgggttgtgctgtgcctggcccttgagaagcagagctgtgactggaaacccagtatcagctgcacagggaaaagcggtctgcaggactcttcctggggtgccctctggcctgtactgtgctggccatcttggtgtctggtcaaaggctggcaggcatagaccacaaccgcacacccatccccaggcacggggatgggccctctcggtgggagatggaggctcagggaggcagcgattatccaacgtcacatagcaagacagcggtgggcctggattccagtttttatgtgtctggctgcatgccccctcccacccggggcctacagctgaaccttgacttgaactgcaggtctgcaagggactgtcagagataacctgagacccatcccaagccaggaaataaactcagccaatgcaggtttcctgggagttacctgagcctcccttgctgcacagccaccagccagggcttagcggctctgtgcctggggtgggtctcaggtccctgctccacctgttcctctccagcatggggacagtggcttctgccctggagggtgtaggggatggacacaggtggtgagtgggatgttccttgtgcacctgaatgagaccttggaaaaccctctggccaggatgtaggatctggggtgtcatttggagcaccaggactttccagggaccccacgctccctttcctgttctgtccatagccccaaagcctgcctgggtccaggattctattctgtggttatcaggatctgcactctgctcagggagagggtggaagggtctctctgccccaggtctatgacttttcggccatcctgtgttgcggacgcagaacagcctgggtccctggccgccatcgcagtggctgggtaagtgtggaggatggctgccctttggagcctgcgaaggtcacgtgggctgaggcccctggcacagacagaggcatcctctgagcctgaccgtgctgcagggcccttccaggctcccacgtgcctctgtggcttccttttacggaggatgctggagatgggtgagcctcatgcttctaaaccctggcccgtgaaacaggatcctggcctcacaccgcacttgagaggggagggggcttcccagggtcacagagcccagagccagccctgcagaacctcaggccggctcccgggcctcctctcagctctgccttgtctgtgatctccgccacagttttccttctctgtaaaacaggagcaggtccttcccctaggaggcggagaagatgcaagagataaaagcagatgctaagggcattctcacgggtctcccccgccagccagcggctcacagcatgtcccttctcccctgggcccgaatctcaggaagtgctgctgctgagggagattgagcaacatccccaattcaatagaggctgctctgggctatcagacatgggcactggtgacccatgcttgctctgagcccggccctgtgccgctcagcgctgtccagagtggagtgggtgcttccctctggacacccccacccccattttaaagatgaggagactgaagcaagaggtggtataggtaacttcccaaggtcacatagctaggataggacacagccgaggcacaaagtcaggtgtctgatcagaggcggcttttcgtgtggggtcagggctgcgtgtgggggtggctctccaggctcctctggggatagcaggctggagagagcgccagccacagggcaccggggcaggtcccttctgactcctagcctcagcccccgttggtacagtggggaccggatggaagaggtgagctgaagactctgcaaggcaccttgccgcactcgttcctgggtggggaatggggtaaaactgcagcatggaggctctagggcagaccataggaagaccctcgacttgggcttttctcctgaagtccgggggcaggggctgtgtcccggctacttagggaggaatgaggccttttcagccgtgggttcagaaggagaccagcagctggggctcctgcagctgcagagctgcacccacaagctcttggggctcatcttttcaggaggcctggagtccctcctccaccaggcaggcccaggaccttgggtggggctggggactcagcctcagagagggcctcctgggcagtttctgcaagccaagccccagcaggcaggaaggcaggcccggctccagggccaggtctgtgaaggagggacacggtggcttccggacaggagggctgccttgaagggtgggggaattcggctccaaagcaggaggaggaggaagaggaggcggaggaggaagaggaggaggtggaggaggaagaacaggaggaggaggttgggggtggagaggaggaggaggggtttgcagagcaggtcagtccctggtgcaccaagtaacaagtcctgtgcttaaatgcgtgctcagatgaaaagcggggcagtcgcggcccgtagacagcgggcggctgggtcagaccgcagagggaagtttccagcggcaagcctccccgcggggaaggctgtgtctgtcccaggagatgagccgcaggcaccaggggtgatgaggcccgggggaggtggatgtgggggatggagcggtcccaaggtcgtcagctccagccggcgccctgggccgcggggccggagagctccggagcggaccctcgccgcgctccgaacccgccccgcgcccccaggccacacccggctcgcaccctccccgctccacgtgcgcccacgcgcccctccgggcctccccctccttcccgcgcgggccgggggcgcgggccccggaggagctgggggcggcgggggcgcggggcgggcgactgccgggccccgggccagctctcgccccccgccccgcccccgatcgctcggctcccccgcccggcgctccctcgggctgcgctccgcggctctcggcggcggcggcggcgggcgcagagcgcggcatgggcgcccgggccgcggggcctggcggcggcgggcggacgggcgcgcggctgcgggcgcaggtgcggggcggcgggccggggccggggccggggcgcggagccgccgctcgggggccggggcgcccgcgtccccgccgccgctgacgctccgcctgtctccctcccgtgtcccgcccgcccccagaccctcctcctccgcccccccgcagctcgggccctggtcgtggcgcggctgccgcacggtgcccctcgacgccctccggacgcgctgcctctgtgaccggctctccaccttcgccatcttagcccagctcagcgccgacgcggtgagaccccggccgggccggcgggaggggcgccgggcaggggcgcgggcgggggctgccggcgggcctgcgggtggggagggcccgcacccgtcctgtcccggaggggtcgctgtggcccgcagccgccgtggcctggcccggccggcggggtccatgcgcctctggagagggtgggtgggcgccgagcgggtggcagtgtggagttggagacgggcctgggaggagtcgggacccccggaaagtggctgatgggtgggtcccatctcccctggccttggaggcccgggatctccgagggagcctgggcctggggagaggctgggtcctgagccgggggctgggaggcgtcgcctgtggaggggctaccctttcccttggtcctctccgcctgccagggagagggaggaggaggagctgccgccttggcagagcccttcgacccaccccaagtagagcctggtccgtggaggaggaggtggcggtggccccaggcaggggccctggcccagatccaccgccccccaggcctcagcacctcggggcttcctttttgttcctgtgattcctgtgggggctgccggtttctatggagacggcatctggggtcagccgctggcaggggccctgggtgctgggcgcagctccctggggcgggtgggctctcttgctttgggccggccaagctgcaccccctggcctgaggtgggccacagccctctactggggcccaggccgaggcccaggacagcccacagagcaggaaagggccttgggcgtgtgctcaccaagtaacctccgcccagacctcgtgtggaagcctgggaggcagcaggggtggaggatgcacttggaggggacctgtccttcctgggtgttggaggtggcattgctggcccttggggaaccccgggttcgatgtagaaggtagcgcctagcctctcggacactccagcctcctggctgtgttctctggaaaagtggggggcaggtgatgttggcagctggggtctcccacagtgccagagccggatgggaccctccaggccattgccagtaaaatcctctgttgacaggcagggagactgaggcccagagagagggccttgctcaaggtcttgggtgagtctgggctggacaggggtctgtgtccctgaccatagtgcacccctgcttgggctgtcccctcaggtgagactgttgatgctgctggttctgcagacagagcctggcaggcagcagtctgaagggccatctcggaggctccctggaagaggtggccttctgtgtaggaggacatagacattatggctttcactgggcagcctttctgggccccttcgaagctggaccaggcaaggcagggcccagcctccagtctccgggtgctgctcttcctgtgggtgttcgaggaggacctgggcaggagagaacctgctatggtgtgtgccccatctgccccttctcccagcccggtgtcaggcctgcagcaggtcagtgttggagtctggaaacacaggcttgtctctgacgaactgtgaccctggactggctctgccttaagtccctctgagcctcagtttcctcacctgtaaaagggaggggacctggactacccaggactggctgtgaggagggaaacagatgactcggagagagtcccaggaacggggcagtccccaggcggtggcataccagccagtcaccaggctgacctccagagtgggcctggcttagggaacttgttcagagaggggcaggtacatgggctgaagggggtgcccctgaaattccagcagcaggggccttgatgctgaggggcctttccaggaggagacccactatgtgccccagtgcacgagggggaggaagcggctgctctgtgggacagcagcggggggcgggggtggaggcagccagatacacagtcctgggccttctttggcaggcggttcgtggctgctgtcggggggcgcttctagtgttagcccagcccacgcacactggtgttcacagggcaggatgccagcaggcatgttgggtgccctgtcccccatcccagacaggacatttgaggccggggcacaggggctggcagtgtctgcagagccacgggaccgagggcgggctgcctggaccctgggagcctcagtgtcctcatctgtgagatgggagggcggttggctctgccgcaagggcagaccatgtgtggctcagtttgggctctgggcaccagcaggggtgtgagctgacagtcagagtgccaggaagaagccagggtggttacagcctctggcaggtgctccctggcaccagagccccttggggccttcctgtcctttccacaccacctcttcctcctcagcaagggctggcccccttgatgctgggcagggagaggccaagagtgaaagggagactgctctctgggtgcagcctgcccctggcaggttcctttgtccaccgtgccgatccctctgagggctgtgggctggggtgccagggctgatgcgggaggcagatgtgtgcacacagaggtctgcagccgcccaggtggaaaggaggaaggctgcgggtgggctctgggtgcatggccacagccttctcccctcctgagtgtggtgtggggagaagtgcacggggctgaggcttgaagtggggtcctgaggggtgtgcaggagtttaccagccgagcattgtggggtgagtagcagccattgcagagtgaggaaggcatgaagctgcggggaagtgggcacaggcgtgggctcagcaggcaggagaggcagagagactggtggcccgcaaggcctggggggctgcggggagcccgagcttactccaggggcgtgaggagccggctacagaatggactggtgggaggctgggaggtaagaggagagcagtcaggcctgggtacccaggggtcccagcaggagtgaggagcgtgagcccagctggcagttggggaggcggccagaagtgagcctggctgggcagggagagagaggggtgctgcctagcttagcctggctggggttggatggacacgttgggtgtggggactctggtctgagtgggcagaggctgtggcttcgggggttcagagtggcctacaggggctgctgaccaggacaggggcctgagatggtggtagaggcgggtacgtgggcaccccgggagccagggtgggatgagatccgggcagggtggtagagcgaggggaggtgagacccacgagtcctcctctagagctggcctggagccagggtgtcggcgcagatgcgggctgcgcagatgccggctctgcggctgcagcaggcctacgacggccggaaggttgagtaaccgctctgagtcacacctgtgaggcggatgatgccacctgtctcagagtggtggggactgaactaggtgatatatttatggcacttgacatagtctggcgtgtagtaaacagtctgaaaaggacagttgttgttggcatgacttctgtgatgtgcctcagactgtattggaaggttgtgaccagggtcacagttcatttgcaaccaggtttggggctcagtgtatgaccagggttaggttcaggggtgtgatcatggtcagggttcagcacgtgaccagaatcagggcccagtgtgtgcccaagatcaagactcacagcctgactgggatcaaggctcagaatatacttgggtcagggtttagtgtgtggctggattcaggggacagggtgtgatgggaattggggctcggggtataatctgggtcaggggtcagagtatgatgggggttcagggcttagtctatgactagagacagaaattagttttgtgggcatttgggagccatagacggtgttggggcagtggcaggacgaaggtggtactgtgggtagaaatgagtccttagggggcaaagggtggatatagggttcaggagaagattgggagtgggagttcatgtggtggaaactggcagagactcggtcaccagccaggagaagccattggtgggagggggccggctggttcagacctagtatgcagggagggcctccgagaattggtgacttctgtgctgggaggagagcccggcgcctgaaggtcagggaaggcgtgcagggcagggggcctggcatgtgcaagggcctgggccgcgctgtgcctggcttgagccagtctccggcaggggcccggcctggctctgcctcccctcggcgtgagttgaggccggtcttggtctacccctcctagtgaggcctgcccaggccaccgcccatcccttcttcatcgcctggaacctgctgagcaacggccgtcgggagtgactgatgagccaggcggggaggagagggatcaggtggaccagtgggagagctggcgggtttgcggctgccaggcctaacgagggcaggcggaagcagatggccacagaggcctgggcctgagccagcctcagagcaggcgcgagacgcttactcggccgcctgtgacctttgtggccagccggcctcaggccagcccagtgtcttggaaacatttactggggtcaccctgtctcccacctgtccctgtccagctggtttcctagccctggacctcagctctgcgctggtaaagttaccggtgactgatgagccaggctgggagggatcggggggccggtgggagagctggcaggtgagttttgatgggagaagtaccggatgatgggacttcaattccagaggaccaccagtttgaggcctgagctccaggctgtggcatgcaggagtggtgctgagcagagtttcctgccgggcacggcatcactgttcccatcttgccctcccagagcgtagtttggacaacagaggtgagcagcgctacctggggtagttcgaggggcctgtgtggaggcagtggcttttgaaagcctggtgggttggcagtgcttctgcacacgaagagaaggcgactcttgttccagggaggcacagctggagccgtggcacctggtacacttgggcagcacagcttggccctggaggcgagtgccaggtgtggggggcgtcagtcgtgtgtgcgggccccaggtgtgcgtgtgtgggagccccaggtgcgtgcgtgtgtgggggccccaggtgcatgcgtgtgtgcgggccccaggtgtgtgtgtgcgtgtgcgggccccaggtgcgtgcgtctgtgcgggccccagttgcgtgtgtgtgggccccaggtgcatgcgtgtgtgcgggccccaggtgcatgcgtgtgtgcgggccccaggtgcgtgcgtgtgtgcgggccccaggtgcgtgcgtctgtgtgggccccagttgcgtgtgtgtgggccccaggtgtgcgtgtgtgcgggccccaggtgcgtgtgtctgtgcgggccccagatgtgtgtgtgtgcgcgcgcgtgtgtgcgggccccaggtgcgtgcgtgtgcgggtcccaggtgcgtgcatctgtgtgggccccaggtgcatgtgtgtgtgtgtgggccccaggggcatgcgtgtgtgtgcaggccacaggtgtgtgtgtgtgtgtgcatgtgtgcgggtcccaggtgtgtgtgtgtgtgtgtgtgggtcccaggtgcatgcctgtgtgcgggccccaggtgcgtgcatgtgtgcgggccccaggtgtgtgtctgtgtgtgggtcccaggtgcgtgtgtctgtgcatgtcaggcgtgtggcctgcaccaccccgaggacaagtcaggcatggcggttcagcctggcttatgactcaggtgatgggttgggaagttgctcggggtgaactcatccatgtagaagcgatgtcagcctgagtcccctccccagctttgcacgcccttcagccacctgacttccctgtctgtcttcaggcctggcatgctggggctgtgcagggccatggggtcgggaatggcagggtctgtggccggcccaggcccttttgaggagaggatgagctgagtgcagtggccagaggcacagtcatgcgaagaggggaagggtcttctgggggcaccgctggggaagagccctgaggggaaccagggggcctggggggctcgggacattcttgtcaggaaagggaggctggccaggggcagggccagggccagcccagtggcctttgcagagccgggtgggacatttggacaacgcccagggcaggagagtcagggaggagtggtggccctccctaggaaggggcagtcacctaaactaagtaccccgcaggtggtgaggaggaagggcccactttattcaggtcaccccggcacccggatgacaccccagctcccacactctcctgcctctgagcagggcagaggtgccctccagtgcgctgatcacctcccccatgccgctgtggcgggagaggagctcacagggggcagggctagaggtggggatgcctggggccagggctggcggctaggcctagaagctgcaggggactgaggggctgtggaggtgacacagagtcacctgccgaacagagagcgaggggtgggagggggagggctttggtgcaaggaagctggtcgggatgtgtccgggctgtggagggacaggtgggtgtggggtgtcagggcctggctggatggcatcttggatgggggtgggccggagtcaaagcggctgctgcccccggatttctcgaagcctgggcccaagaggactgtgcgtgtgggtgggcctggacctggcacctccctggccccgtctgcagtgtggggctggcgcctgcctggaattgacggggttccgagacatgatggcagcaaagacttatctggcatcgggcttggcatatgactgtggggcacaggcaaagggcccaacctcacagagcacagccccgaaagggagttctggagggcctgggctggtagaggaaacccctcgtctgcagggggcgggtggggaggtggaggaggggctgggccaaacgctgggggtgtgacccggggctgcgggctctcgggtctcagtcttcgggtctgccgagtgggcgagtggggtgcctcactccctgcggtctcttcccggtccccacagaacatggagaaggcgactctgccgtcggtgacgctcatcgtgggctgtggcgtgtcctctctcaccctgctcatgctggtcatcatctacgtgtccgtgtggaggtgggtgccgcccaggtgctgggcatgcatgtctgtggctcctgcatcacacgcctcttcccttgaaggtcacgggcggggtcgtgggtgcccctccctccatttgtcctcacgttcccagtcacctccgcatttgccacggaaccagccatgctgtggcccctccgaggcctccacaggtcctgaggccaccccacacactcataatgtgtacatgccgcacaaacacagggggtggggcctggttcctcccctgaacgtgccccctttgcctgcacttcctgacttccctgtctacccttaggcatgcaggccaggccacagccttccccggacccccagtcaggccttaaggcccaaagcccctgctcactctccaccccaaaccccctttccccaaggccacagggctctcagcctgctgtccattctgattgtggccagtgggtttttggggccacccaggcaggtgtggagagatgtggaggagagctcgtgtttgagcagtaacatgcctgttgagtgtgtggacgcgcctccaggcactccccgctatctgctcctgtcccattgagtagaagtgtggagcagggagcaagggctcaaggtcactcactgcccatggggccgagtggggactcccaacgtgtccagaggacacgtggctccggctctgcaggcagcgcgatgtcagccgataatcggaactgactgcctgtctgctgcccaaggtcgggcatcgggaggtcaatgtggctggtgggggagggtggccgagctttcccggagacagtgactgggttgtgggtagtggcaggggctctccactgtcctgcctgaggggacagcatccactgggctctagggggaccatggtgtttcctcttcccgggacctgccttcccctagggcctggattccacaaaacatctggggaatggggttcaggggctctgaactcagctctgatgtcctgagttctgaggaagttttctgccgacagttttcaaagcatctcccttggtgagctctcctggccatccctgtgccctatgagctgccggcagggactgttctgtggtccccatgaggaagtggggacccagagagagaacgtgacctgcccaaggtcatgcagcacatcagggtcatgtcagagcccctgaggctcagccctgtgccctctgctctccagctgggtggacctcagtcctcaagggctgctggtgatggtggtgatggtggtcctggtggtggtgtttgtggtgatgatggtggtaatggtgatggtgggggtggtgctgctgctggtgattgtggtgatagtgatggtggtggtggtggtgattgtggtggtgatggtagtgatggtggtggtgatggtggtggtggtgctggtgctggtgattatggtgatgatgatggtagtggtggtgatggtggtagtggtggttgtgatggtgttggtggtgctggtgctggtgattgtggtgatggtggtagtgatggtggtaatggtcgtggtgatggtagtgatggtgatggtggtagtggtggttgtgatggtgttggtgctggtgctggtgattgtgatggtggtagtgatggtaatggtcgtggtgatggtggtgctggtgattgtggtggtggttgtgttggtgttggtggtgctggtgattgtggtggtggtggtgatggtgatggcgtgatggtggtggtggtggtagtggttgtgatggtattggtgctggtgctagtgattatggtgatggtggtgatggtggtggtggtgatggtggtagtgattgtgatggtggtgatagtggtgctgatggtggtgatggctgtgttggttatggtgatagtggtaatgattgtatgatgatgatggtggtgatggtgatggtgtgatggtggtggtagtggtagtggttgtgatggtgttggtgctggtgctagtgattatggtgatggtggtggtggtgatggagtgatgatggtgatggtggtggtgatgatggtgatggtgatggtggtagtgattgtgatgatgatagtggtgctgatggtggtgatggctgtgttggtaatggtgatagtggtaatgattgtatgatgatggtggtgatggtggtggtggtgatggtagtgattgtgatgttggtaatggtgatagtggtaatgattgtatgatgatggtggtgatggtgatggtggtggtggtggtggtgatggttgtgtgataatggtgatggtgatgatggtgatgtagtggtggtggtgatggtggtagtgattgtgtgatgatggtgatgatggtgatggtgtggtggtggtgatggtggtactgattgtgatggtggtgatggttgtgttggtgatggtggtgatgattgtgtgatgatgatgatggtgtaatggtggtgatggtggcggtgatgatggtcatggtggtggtgctgttggtgacaatgcctgcaggaagtggggtggggctctggtcttggtgccacaggaccacagcccctgtgcagatggggttctgttgggtgctgaccttgggcccctgcactctccacaggtacattcgctcagagcgttctgtcatcctcatcaacttctgcctgtccatcatctcctccaatgccctcatcctcatcgggcagacccagacccgcaacaaggtaggcagccttgcgtcctgccatgcacttcccaacatcctcgggtggtgaggatggaccccaggaggggcctggaccgtgggatccctgggaaactcaggcaggcgggtgtgggggcaggaggaggctgccccagctacagggagttccctgccctctgctgtggctgcaggagcctgtcaggggctggtcagccggccaagaagggcagcttgtgttccagtgtctctgctggacttgcccttcaggatgagcctgctgcagccctgcccatcccgctgtgggcagtggactcggcctcagctcaagctgcctcagggctggggagtggcactcaagacgagtggcactgtggtgacagaggctcccacggtccaccctctcacccctacgctcgccagccttgaagctggcagctcatggagggcccctgcctgccctccccagaccccctatccctggttcctaccctgtggtctccagccccatcccactaaatgtggcaggtgcagcctttggctgggggcctctgcttcctcaaggggccacgctgacaatctaggagagaaaataaagcaagagggcccgcagtgagacagagaaggcctggccccagggcctgccatgtgctgtggcagaagctcagggccgctgtgtgggtgaggttgcctgcgacttgctgtgtgtccttggggcgtgacgtgccctccctgggccttgggcttactacctcctgaacgcatgggcgggtacctggacttttgagaaggcccctggcttagcatttggtgtggctatgaatggtgctgagaaagatggggagggaggatctgtttgtcccaacggggcttagatggtcaacaattcatctcagggcaaggaccaggtgatctctggattgccttctgcctggggacctggttgggtcccagtgagggtgctgggtgctgggctgccagctgcagacaggcactcagtggggacaggtgtggggccggggagcacctgcccagcctgccccgccctgggccccacacaggtggtgtgcacgctggtggccgccttcctgcacttcttcttcctgtcctccttctgctgggtgctcaccgaggcctggcagtcctacatggcggtgacgggccacctccggaaccgcctcatccgcaagcgcttcctctgcctgggctggggtgagccgcggccttcccgaccctcctggacagatacccttcctcccccactgcttgttctgtcctggcagcccctcctctccccatcccctgtggacccctggggcctcagttgctgcttgggtgggcttccccctctgggccctcgttcttccatggagtcaccagataaagcacaggacacccagttctctttcatgtctagataacgaaaacgtttctagcacaagtatgtccggtgcagtatttgggaggtacatttacaaaaagatgattcctgatttctctgcgagtcagatgtgccgggcaccctatgtgttctctgctcattggaccaccctgcgcccagctccgcaggcccttgccttgttcacctcctgccccatctcttgctcagccccatcctctgttgggggcttcagaagcgcctgcctggcccccgcccttcacggcagggctaggaggaggtggaggctggctggggacttgggtggggccaacaccctctctctgctccttctccagggctccctgcactggttgtggccatttctgtgggattcaccaaggccaaagggtacagcaccatgaactagtgagtcggggcattgggggtgtggtggatggccacatggccccccagagacttccaccgccctggagggtgagggctggccatgccctccccccgtgtgaccctgatcatctcacagaggctcagggagggtggggccccaggggctggaggctgagccccttgggcatcccctccctgttggccagccagcttctccctggcagcgagcagtgggcagcagtattgaaagaaaccgggccatcagggcctccccctctgtcagttggtccattagtcactctgagcctcagtttccccatctgttcggtggggagcccccctctgtacggtgctggtgagagggagggctgtttgagacatgagctctgggcacagtgggcacaccccccacagcaggcctgtggcaggcagggcaggggtcggaggcttatttcacagatgatgtcactgagaccctgaagggtcagctggaccaggtccttggggccttaaatggcaagccaggaagcttggggtcatcctagaggcagtatggttcaccgggtagggagaaagggtctggggctcaggatgggcagaagaactggggtggggaaggggaaccgaggcttgaagggagggcctggctgcagggaggggagcagtggggagcgcgaggcaggaggaagtgactgatgctggctgagtgggagggcggagcaggcctggctcactgtggagcccctggggacaggatgtggcacccccttggagcactgccctgtctaggtggcagtagggggtagacatagctgagggcccagggggtgagtgctgagagggaaatccaaacactgtccccagagatgagagaagcaaatacctggcctgccgaagtcaggggtggatcaggaggggatggggacattgaagtggggttctgaaggatgaagaggagtttgtttgacagatgacatgaggtaggctgctcagggtagagggaacggtccttattgggtttcaggtttccatgggcaccacaggtggtgtccagagatctggagaatgtggggctgcttactgggaggggggtggggagggggcaggacagatgtgtgagcataggaccaggtgctgaggccacggggcctgagccccagcattcaagcatcgcgtcaggaaggagggtcggccagagaccccaagagaagagccaggaagggcccaggcctggggaaggagggacagtcaggtggccttggccctgccagcctggtgcccctgctgtgtggctctaagcaggtgggtccccccctctggtactgtccccatctgtaaaatgggggtgacagtggctgcctggggtctcctgaggattctaaggctaaagagtgggtgtgacctgccctgcatgccgaaggcgcttaataagtgccagttttcttctgccacttcccagctcacccctactcctgagaggccggcagcacctctctgcacgcccctctgcacacgggcggtgctgatggcctgtctcctccccagctgctggctctccctggaggggggactgctctatgccttcgtgggacctgccgctgccgttgtgctggtactgacccgcccaggccccactccccacgaccccacctgggccccccacctgcctcctgggcctcggtgctgtctcatgccccaggctgtgcacctgctgtcccttcaggatggccctcatggccctcatcaccagggggtgggggtgcccacagccccactctgacctgcccttggcatgcagtgcaggggctgggccagggtagtgacccttcacacctgtgagtctcggcttgcctgattattgggtgccagctgtgtacctgccaggagatccccgcgggtgtggtgagtgagtggcatgggaggaagctggggatggacggatgatgcgagcagcggggagctgcaggctggacctgggttgtgggtgtctggccccagagcgccagatgtgaggctggtgaccgcggctgcttgccccttcgggggccccggtgaggaccttccctgtgtgggtccttgggctttccttcccgctctcctcccaccttagtgtggaggaaggcaagactgtggcaggtggcacgcagggtcaccgtcctggggtcacagatgagctgcggcagcctgggggacccgcctggggtcactggcctctactgggtccagctctgagcccactcagccagcccccacctctctactctggcagagcaccagggttcacacccaccctcacatcccctcccctctcgccccaggagaggccatccacttccagtaattcctgctgccatgagcggtgtctctgcagggccacaccccatcctagtggggactcaggcacaggctgggcctagcagagaaacgtgcatgaggggtgatggggagctagccctgtaggggcagttggggagcctactgggggttggaggggcagtggggcgccatccttgggcagccccagacccctccccacagccctggctgtgggatcctaccttctttattccttcctccaggcgggaggcaggagaggcgtggggtacctggcggtaccccaggcacctggggatggaggttgtgggaaaggggacagagacaggagtcccaccctgtacacccctccccaggatgtgtcaggaaggcaggctgaccctggcggctgtgggacccgagccccagcagcccctcctgtccttggggccacgtggggcaggctgggcagagcctgctgcaggcagtggtccgtcactggtgtccatcctctcttctctgctccggccacatcagaaaagtaggctgcccaggaaagaggccaccacccatcaggctggccaaggctgtgatgtgggtgtctgggaactctgcatccattgtggaaagcaggccggctgtgtggtcatgagccctgagctggagggctacacggtctaccaccctggtcttctggacgtgaaatgcctggtcaggggtccatggagtcctggggtctcccagcctccagcttctggaacctgggcctgaggaagtcaggccttgcccctcggggtcctagcagcatctttctgcagagtggggatgcaggaggagggcctcagggagcctctggcagttggggagcagagagtatggcctgagactcctccttccccccagcagaggaggccaggagacagggggagaccccaggatgctcagggccagtggcttcccgggggtgctccaggaacagctcttgtattgactggtagcctggacagtggcaggcatgggagacttatgttagagcccaagaagagcctccctgggtgcaggcgcccagccagggcccttatggggtgggcagttaatctgatgggaataggggagggagatcaggaaggaagtctagagagaggaggtggcctgcccagagcagagagccaggaggagtgtgaccccagggagagccaggattggtgtcccttagacaggtttcagctgcaggctggcaggggcctccgggccctgtgggtggggagctcgctggtggaagggatgcaaggagttgcagcagaggtgccgacggtgcgggtgacacacagagagggccctgcacagttggcagctgggctggaggtcacctgacatcccatcaggcactggggttcctgtgatggaggcacgggaggtgaccctgggtggggtagggggtcgtggttggcgtagccagcatcggtccggccagtgtcagcccctgagcctacggcggcccccacccccacacccccaccactctctgcccggcaggtgaacatggtcattgggatcctggtgttcaacaagctcgtgtccaaagacggcatcacggacaagaagctgaaggagcgggcagggtaggaccggggctacgcggctccttgcccacccggagtgcaagacccagagcccacccagccccgggggatggagaacgctccatgcccaatctgagactgcaggtccagggaccccggagcgggtgggaaacggaggcactgagtacagaggccccttaggctcagccagcccctgcctctcaccgtgcctcagtttctccatctgacctggacagggtgggtcccataaagtcctcagaagctgtgagactgattgtgcagggacaccccgcctctgcctggcttgcaggatggcagcagggtgcccccaaggctgggtgctgggggtccctggccccccactcccctaccacaaggcttgctccatggccagggggaggatgtcgcctgtccatgcagggactccctgtctttgtgggaccttcatcatggggaggatggtgcagaggacaggtggagctgatgttcctccctccggggaacccaagcccagggagtgctctcagcacagcagctggacagggtgctggagcaagacagaggcgcttgggatgtgtggctgcacccacctttgagggacagggccctgggcacagaggggaagctgcggggcgtggggagctgactagggcggacaagcccctcttggtcctcccgcccctcacctctgcctgctgttctgtgtcatccagccctggctggtgtctgcgtgggcccctcccctccgtgccagtcttgcttggatgcttggtgtctctctgtctctctctctgttcctgtctctctcttcctggctcctcctgctgtccccagtgaacagacgctttcaggaagccttccccttgggtgcctgtgggttctggtcctggttaggaaccagccgagctggtgtctgatgctgagtgcgtgccatggccctggggtctgtcactctgggtgggagtcgcggtgctttgtctcctggcctgggagatggaggctggaacaggcctctctaaggccttgccctacctgtccccggaacaccctgtcccacactgctcccaagacagtggtcacactcagaagaggtccccagggctacacatccagggtctgagcatggcagactgcctacctggtcgtaaaagcagcagtgatctcaggggctcacccagggtggatgttttgtttgcttcttagaataaccattgtggcagattctatggttatagtcccatcttaaagctgagaaatggaggtttagggaggttgagtggctgatggagctgagcttccaggccaggtgggcacacactagaactaagcccaggcggcctgcactctgcccacctcaccctgtgtgtgccacgggggccagctgcgttaggtgcacacagcccaggagcgcacccagactcgcctgtgtggccgtgtaggtctcgccgcccacgtagacgggatggaggttggggtggaggggcacccagtacaccggtctatgtgtgcacgcacacccacacgcatgggcacacacacgtgggcatacacatgccacgaggacctgcacgaggtccctgcccaggtcagctccctcgcagacacacggaaaggggactggaaggcgcagcggcctccctctgggaattttgccgctttgtgcagacggaggcagggtccaccctcagctgagcgcagggacccctcactaccttccccccatgcctgccacttgcagccctcagccctgcccaccacagcgcccacgccccaggcctgagttcgtgaggtggctgagagcccccaggaccgtccctgttggggcccaggctggactcctgaggggctggttttgcactttggccccgcccctcctgcctggtttccgagagcagggcgcttgctttcgtttcagccttttaatttcacttgcagtcagccgtccccgcaccccctcgggcgcgccctcaagtgtgccgagtgtggagtcctctctgccgccgatgccacctccgacgccaccagtaacgccatgttagtgcctccgctgccacctccctcctaggcccacccttggggctccgcgctctgagtcaccttctgtttgttttatgtttatctttcatttcttccttttctaccgtccactctgggtttctaggccactcccgtccccccgatccactgccctcagctcctccttccatcctccccacaggcctgctctaggcctggcagcacaaggcaccgcgggtgcagggcgtggggccgggcctgggcacaggtggagtgcagctgtgggctgcgctgcggtagggaaggagcggtggtcagtcctgtccctctggggcccgagtgtgtgccaggctgcaagctgtggtttcttgcttctggagttgaacctccacccccacccctggtgctgctggcacggagcccaggatggctgatgcctgggcaggggtctgcacccatgacacccccgcagttctgtggtggggcgaggagactggccctggcctgcctgatgggaagcctccctccctgtgagtgcacatgagcacacatgtgagagcatggctaggtgtgtgcatgtgtgtgagtgtgcatgcatgccactgggggtgtgtgggtatgcatgtcaccaggtatgtgtgtatgagtgtgcatatgtgagtgtacatgagtgtgcattcgtgtgagagcatgaccaggtgtgtgcagatgtgtttgtgtgtgtgtgtgtgcccatgtgagagtacttgcttttgtttcaggcttttaatttcgcttgtagccaaccgcccccatacccccttgggtgtgctctcaagtgtactgagtgtggagttctctgccgccagtgccacctctgatgccacaagtgtgcaagtgtatgtgtacatgtgtaagagtgtgccttgatgtgtgcaagcatgcatctatgtgtgtgagtgcaacccactgtgcatgtgtgagcgtgcatgtatgtgtgtgagtgcaacccagtgtgcatacgtgtgagcatgcatctgtatatgcgtgtgtgagtgtgcatctgtgtgtacctgtgagcgtgcatcggtgtacctgtgagcgtgcatctatgtgtgtgagtgcaacccagtgtgcatatgtgtgagtgtgcatctatgtgtgtggacgtgtgaggatgcatctgtgtacctgtgagtgtgcatctgtgtgagtgcaacccggtgtgtgtatgtgtgagtgtgcatctgtgtgggtgcaacctggtgtgtatacatgtgaacgtgcatctgtgtggatgtgtgagcatgcatctgtgtgtgtacctgtgagcgtgcatctgtgtgagtgcaacccagtgtgcatacgtgcaaacgtgcatctgtgtgtgtgagcgcaacctgctgtgcgtatgtgtgagcgtgcatctctgtgtgtgagtgcaacctggtgtatatacatgtgagtgtgcatctgtgtgtgagtgcaacttgatattttgcgttagtgtgtgtgtataagtgtgagtgtgtatataattgggcatgtgcctgtgtgtgcgtgtgtgtgtatgagcgtgtgagcattgtgtatgtgggaatgtgtttataggtgagtgtgtgaatgcgtgtgtgtgtgtgtacgcatgtgtgcctgagagcaggaggcagccagggccaagggaacagggaaggaagggttcagggtcaggggctgatctgctgaccttgggcagccttagcagctgtgcatagggcagggcggtatgggctcaggtgggtggggccagttgggctttccagcctgaggggtcatttcgtccgtgccctgcctccctcaacccaaggtgagggtggtgcgcccaggtgcatacccctgtaccctcctgctttgctccctgagccaggcactaggggtccagggttttaggagccgtgggagaagagctctgggccctggcactgtgcagatgcgagtcggggcgaggctagcctgggtgggaggagcaagcccggagctggggcagcgtccacactggcctgccaggccccgggaagttcaggttctttggggctagtgttgccctttctttgtctcaacaccagggatgtggcaggggctgtgggatccaccccatctcattccatcagagagaagtgggggccagaaggatgttccctttgcagtcactcagagcctctccccgcaccccgggcacctgcctctccagacaggagcaggcgcggtgcagctgggcactcctggcctccccttcagcagctcccgggcctttctgcttccttcccaccgctctctgcagaaatgtttcccagccgcagaggctgagctgctgtgtgggagtaatttacaggtccccaggccccaggccacctgccagccgcagcagatcgggctgtaaatgtcaggcctggagacccagctgcaccactgtatcccctgacgggcagcagcaggggtgactgacagcaggcaaagaagtctccatggggagggaagccttgcacctcctcccttaggacttgggtgaggagaggagtccagggtcccggctcaaagaataccagctttggaagggagaagagagattctccagcttatcgccatgggaaaaccgaggccccagccgaggggtcctgctctgtgtcagtgagtgtttccttggctctgtgaatattgatggagggcctcctcatcacaggccctgtgccaagtgcagggacacagcagtgagtgacagccagggccctgtccgctgctgcagcctggagggagcagcacggtcatgggcaagggaggcctctccggacgcctgagttcccaggcgtggggtgcacagggagcaggggcaggctctccagggccaggggaagggccaaggaggttggtggcctctagtacactccaaagttgtacagggaagaaggagtcccatgaggctattagagcccatcctatgtccaagagcaggaggggcgggtgcgtggccagggccacggtaccctgagacccgggaggcactggccatgcaggaccaggccctctgtcctggtgttgctctgggctctgggcctgcacgtgtcctagccatgggtatgtggtcatgcctgaggctggggccagacagatccctgccggacagcatcactgaagaaaagcagaccaaggcctggggtagagggccggatggaggagaggaggaagagagtccaggaggcaggcatggctggctgtgcctgctgagaggtcctgagagatgacgacacagatatcccttgggggctgggccctgcacaggtgttctgcactaggggtgggagcagcattggtggccaagccacactagagagggctgaggagcagagcgtgtggttttggaggcccttgtcctggcagactccaggtcattccagcatctctcctgccagccctggtgtgccagctcctgcctggcattctgaccgcacacctgggccccctactccctattcagtcctcctgccccagctccccctgtgtaggaggaggggaggagggaagctggcgccagcacccattccgggtggtgatgacagtcctgcgggctgtggggcctcctgcgggcaggcacagggccacctcccgagcactcaccgcagccggggtcctgctggcctctgtctgtgttccacagccccgggaagcaggttggtgtccccactgtgagcaggagagcacaggctcagaggccacgcgcggaacccagtgggtggatgtggggaggggcccaggccttcactgctcccagcgaggctgggctgcaggggcgagggctgctgtgaggctcctggaggacctcctgggagggggtggcactgagcggcagaggcagcaggaagggtctacaggcaggtggccgctggggctcaggaggcatgggcggagctggcccacgaagaggaggaggcgcctgtcagtctgtctgttgccgtctgtctctgtctctcctctgctcctcccctgctggccttggccgtctgtctgtcctcatctcattccctctaagcttctctctctccaggtctctgagttctgggctccaccctcccctccccaccatggccatcttgctctgcccttcagggcctggacccctcgcctggggcctgtgggctctctgagggtcctggaccaggggatcctccttggcgcaccccacaccagacagcccatccctctccagcctgtctcccttcccctgtcacctcctagactgtcaggaacctggatcttcccaaagagcccttcccccttgcccagcttctcaggacctccctcctgagtccttgggtccactcagagaccttgggcttggggagggggtgctgggacctcagtgttgacggtgggctcctccccagcctggggcaagggcttgagaggggaggggcagagtgtgggacaggattgggggagtcctggggaggagagagggtgcagacgcagcctgggcagtggtggacccctagggagactcaccccagagaggaagggctgcttggcccaggcccccagagacagagacggggacttagggctgggtccccaccgaggcctggagatgcagggttcagggcagggtgtccctgggggcaggggcgggggcggcagcgctgacaccctccatccccagggcctccctgtggagctcctgcgtggtgctgccgctgctggcgctgacctggatgtcggctgtgctcgccgtcaccgaccgccgctccgccctcttccagatcctcttcgctgtcttcgactcgctggagggcttcgtcatcgtcatggtgcactgtatcctccgtagagaggtgggtgaggcagcctctgtcgggccgggctcctgcggggtcctggggctgccgagtggcctcctccttccccgaggacctcggcagggagattgtgggtaggcgcagcatccatgaccctgacacatctgcaggcctcggtggtccacagagcggggcctgcaggtgagcgtgtccaccccactctccctgggagcggcccaggcagtgcagcaccttcccaaggatgccctgcgcccgcactggcttgggggcgtgggggacgaaagcacatggggcccccatcctcaaggggcctacaggagtgaggaagctggcagcagaagtagcttccagggcaatagagactcctgcttccggcgttttctggatctttccagaaggtgtcactagaaggttttcaccaaactacatcccaactaccgcctggctggtggccacgattgggatgctcttgcggaggctggaatgtgggaaagcatgcatgtcgacctgggtggcgtaggacacctgcttccagatcagcgccaggagggcggaaggcccaggagcggggcggccacctcccccttcctgggtccccctggagagacggcagaggggctgttgaaaagcacacaggttcccgaggatgaagaatacaggagaagccgacagcaggggagccggtaggcagggaagcaggatgagaggtgcagtcccagctaactggagacagcccaggcttcggccagctgcaaggagccagacggtgtcaggagtggggcccgccccctccccaggatctctggctgccacaggaaggtcaggcgtgggaggcctggttttccggccttaggtggcgatttccatcccagcctggaagggcagggctgccctcttggcctccgcggcctgggcctcactctctgggcagagtgaacagaggggctctggcctggggcagctggcacagctgaagatggggatgccgcctggaaacaagtcagggaagtggatgtgctgagcctgggtcacgtgtcagcgcaggcctcccagacccagacctctgcggggaggtgtgaacgcccctctcaaggcaatctgacttcgaggaaagacaagaggaggaagagccagagttctgatgtccagcagcgaaacggctcctgtaccagtcaaccaccagccgggcagtgctccacacttacatcccagcagctcctgatgaggacagcagagctcctgttggagttgcaacccaaccagacaagcaggaaaacagcgtggggacagaggcagcccaggaaggagaaacctcagtggccccttcttatcctcacctgggagaagccgctcaccctggtgcacgccacatgggccaggccctggtcccagcaatgaactcgtgttagtgaatctcatgacagcttctaaagcaggtgccacctgctccgttccagacaggacagctccagggagctcgtcacaggagctcatcaccatggctgggatttgaggccaggcggttcttctttgaggccacactcctggcccccagtgcctggcttctgtgaaacaagaacagtagcctatgaaaaaggaacaaaaagagccttgtggaaattaaaaacagagagcagctcaaagctcagtagaaggaaaatggaggcaaaatatctcacaaaatagaaaagacggaaattggagagatttctcaaacaattaggcaaatccccaaggaccaactgaccggtgacgggagctgcaaaggagacagcggagaggaggggctccagggaggcagagcccagggccagctggagcagagggctggcactgggggtctcagatgtgcaagaagcctcatggttggcaaatggggtcagggaaggaggggacccagcatgctcctatggtgggcggggacagaggacaccagggccagacttccccgaagcccccagtgagctcccagcccctgtgtgtgggctccgtgctgcagggccttcaaggtcctgcccagagatggcttccacctgggcctggtagcaaggggccttgcctacccaggtcctcagcctcgggggtggtggccagggctgcagagcatgctgaggaggctgggccaggtggaggccatgccgggcagcccagccggccctgtggcctgggacactcctgcaggtgggcaagtcagtccctcgtctgcccatgaggctggggcctcctgggctgaggctggctcgggtgttcctggagagggtaccagagggacttggggagccccagctcctctgctcgcccacagagagcacttccctacctgcctgtgggaccgggcacacggtaggtgcccagtaggcatttgcggggcaggtccatgagggagaggatggcaggaaggcacacctgctgtggcggcctggagtccttagctggtgtccgggggtcagaggccactgagaccctggtttccaggcctggccctgcctctgaccagctgtgtggccacggacaattctctcgcccgctttgggcctcggtccccatctgcctgatgagaggggtgggctgggtgtgctcagccccccagcagcatgaagcagagcactaggtgagggaacagggccacaggtctgtggttgagtgggtgggtaggtaggtgggtgcctggaagccaggagccccagcttgccctctttctgcctctgccaacttctgtttggatgcctcctccaggaagccctctgtgctttcatgccccccaccacccccaaggattccctttatatactgttaccaccgcagtgtcagtgtgctgcccagagcagcccacaggaggtggctgctggccccacgggagggacagttggcattcgtagatgatgtctcctggatatccagtctttacctccttgggagttccctgtccataagctctgctggccgctggtcttcccctgtagcccctcctacagagtctgctgccgtcctcaccactgtcccccctgaagagtgggtggccatgaagggtgaaatcccccttgacagagtgctgttcccagtggggtggctctggggaggggccaggctcagggaccctggcacagcaccccacactcccagggcagtgagggccaggctttccactggctcagaggaggcaacgacattgaggctgctggagatgcaggccaggtccagggacatcttcggcccgctgcaggtcagggcaggttctcgcaggcggactctggcccgagggcctgcagcagctctcggtggctgggagcttggtagagagaatctcagacaggagaggggtaggctgttcccctcctggggtctcttttccccttctccacccagtgggtcatgactcagcagaccagaggtggccctgtggggaggcctcctgctgaccagccctgcccttccccgagacgcccgcccccccacaggtgctgctcatctgatctggcgctggcgcagggtgggggcgtggctgccactgaggtgctcggctctccctccccaggtccaggacgctgtgaaatgccgtgtggttgaccggcaggaggagggcaacggggactcagggggctccttccagaacggccacgcccagctcatggtaggactcagggcccggggactcaggctgccctacctgcctcgtacccccgccaagtgcctccaggccctcaccgtgccccaagctcccctaggccccagcaaccctgctgagaggagctctgaacccagtgtgcagttggggaaactgaggctcgccaagtggaacccctggtccggggtttccagctgggaaggcctgagctgatgagtttggaggtctcagcggaggctggcatccaccccacactcacccccgctggcagcagtgcccgtctggctggacaccaccctctgagcatcccagccctcaactcaaggtccccatccttacacctcccaggcccaccctcagtgccctccatccccacccaggaaagtcctgctcagctgccacctaggggtccagcctagcctgcccatcccctccccctaccccgcatattcccacctgctgcctccctggcgctccctgggtgctgcccagtcctcagcccctgcagggtgactctcccttgtggcccctggccatcctgccttcaccctctctgggctctctgccctccccctgcccatcctggtgtcctcagcggtgtgttctgcaccccccgcccctgcctgtgcctgcgcctgtcctctttacagcacagcgttcccacgacacgcacaggtcctgggagggcggcccaagtggcggttcctacgtaagggcccccaacagccccctgtggagcctcaactcttccacacctcgacctcagcatcttcctcctgcagccttgtgcccctggggctcagccaggaccgtagtgggctcctagtcaccaagtctgctcccacccacacccgtcactagacctcctgcttctgcacccagaggctagcacacagggtggagccaggcccccttctccaccctctaggcctcaggacagcatccacgccctggcctggtcctgtgcagaacccgcagctgtgctggtcttgctcctgcccctgtgtccttcacacaagcttccaccccaggtgttggccaccctgcgcactcccgtgggtcccctcctccagggagccctccttgactcttgccccatggtgccacctttctgggctcaggccacgcccctggtgaactctgcacggctggtgcgcgggaggtgctccctgggtcccggggtgcccagccacctcacagtggttgtgaagctcacaggcagggcctcagcagatggcatgtccagccccgggtgagggtgaggtccttcagtgagagacggccacttcggctcttgggtgacgtccaggcaggcccctcatggctccatgcctcagtgtctccatcagccagggagcaggtatccaccagtggctagcttgtcattttgggacacagcttccccctcccccagcgtttctcctggcctgacctctgatcccagggggaagattttgttgtctccatccaacccaacccctgcatttgcagggaagaaacctccaggttttcagtgaagggtgggcctgtcccctggagccccagggcccctggagaaggacagccccaggcttgggcaggtcctgagctccctgagggcgggtctgggccgcccactcctgcctccccagctgactgtcagcttggtgtggctgcctgagggtggtgggtgccggccttggccctgaattgcatgttcaacatccccccccaccacctctccctccccagaccctggatggggcccccttggagggatgtgggggaccaagggggagagttctggtgccgcaggcccagagccattcctgaggcctggggggagagatgagaccagaggaagcaggaggtcatcagctcccagacgccttggagagagcacacatgtgtgcctcacaaacagtctcacacacacctcagaaacacacacacagccacatacagaaatacacacgcatgtacgtgtacaaaacactcagatgcattctctcacatttacaaacacctgaatccacacgcaaacacagggacacaaattcacccacttatacacagacatatccacaaacacgcacgcatacactcacacacgcatccacccagagacacaaacgcccaccacacaggcaggtacatggggaggcatggtcgcccacgtggggcactgggctgtggacatggacaggggttcctcggggcagcaggagcaccgtggccctcccgagcggtctgtgcacgcgtgcacacacccccgctcccagaggcgctcaccctgccctgttgtctctgtcctacagaccgacttcgagaaggacgtggatctggcctgtagatcaggtgagcgcccgacaggtgagaggacagtgccagcccggccccctgcatggccccactccacgcctccgcctgtgcctcccccacatcacccatccctgtccactcctgctgcccccacccacacccagccacaccgtcaggcccacctggacccaggggacctgccctgggggcccagccttccacccccgtccacttcctgaggccgaaggagggtccatggggcatgatcagaagcttccagaacactgccctggcactcctgctgagcaggtgcctgtggagcgcctggctgcgtcccctgcccacctgacatctcttcctctgtcgtggccccagcgaggagcacagcctcaccctagtgccgctccccccccctgcctcctgcccaccgccctctagcacctgtgttctgtgccaccttcatttcctcattgccagtcccagcaggggcagaagtgagtggggctttcaggctagggggacaacggggagcaagaggaaggcggggagaaggacccaccatggagcccccggccggtgctgagcttcctggaaccaagtgcaaaaaacgaacgactgcccaataaaggaagctccgccgcccatccccaagcatcagactgcgagggtctgtttctgtccccaccactgttctgtgaaccaggtcctgaggcagtgacaggcagtggctttctgagctgtggagaggccaatggaccatgctccctctggtcatttagatatttgaagagcaccttctctagagacagccctggcagaggagctgggacagccccaggtggggagtgtgtgctggtgccagttgggccccaggagggcttcctggaggaagtgacttcggggctgggctgaatgggagctggacaaaaagcaccttctgcccccttggggtctcctgtgaaccagtcccacagcctctcagaggggtgaccctaggacttggggcctcaggtggcttgggtgtatgtgggcctctctgagcccctgattccctctcattcatgcgctggctacagcgcctggtggatccacatgcagctggtggatgcgccatgagcagctggtgctgagcgcctgggagcttcctcagagcgggagggtgggcggggtgccagcgaggggcctgggcctggggggagcttggcttttattgtgccccaaggtgggtacatgcgagggaggcacatagacccctcacgtgccaggcgctcgttctgccttgtggggagcaaagtgtgaggtgtgtgggaggtcgggagccccagggtctgtgcggggtggggcggccttggggacgtgcgtcccgagagtgctgtggctgtctgggtggggcatgtgggtctgacggggaggatgacgggtcactcttgggtagggacgagggaaggggcggggctgaaaatgggcacagggtgttgctgtccagagggtggaggagaggaccaggccgggagcatggcctgctgagctctgagggggacggggaagcctgtgttcgggagagagagtgacccctggctaggcagcttggggggcattggtgaccctggggcccgtgtgcctggcaaggtggctgaagggagcagctggtgaacacaggcacccagggctggcttggcgtggtgggtaaccatctgccagcctgcatggggcaggacacagggggcaggccaggcttcccaggaagggccctggggtctggatctttggagactggggcttggagaaaggaggggtgtggagggtgggcacccctctgtcaggggcaggcggctgggtcagagtcagcttggggttctccgccagccagtaggggctagattcattggcaggaagtcgggggcaaactggagccccactcagaggtcaaggcggctgggccccttgcaactgaccagagacagaatcagaggtgtctgggtatggagacctctctccagggaccaggcggccctcagggcagagcagggaggcttgcaggccccaggggcagcgatgcaggaagggccgtgacagagggccagggcctcgtggctgcactcagcaccactgggctcccgcacactgccccccacccacacaaggcccagggccgtgggcgtcgggagcgttggagggccggctgggctctgccaccagcacagaccgttctgcctgtgtccctgtgcttccgggagtcaaggccgccctcgcctgctcttctcagcgctggggagggcagtgtgtgggtgacagccatttgtcttcttggggccagtggagagggccaccctgtgtggcagcctcatctgaggacacaggaaccctaggggccgtagcgccaggcttgggtagggtggtacctgcagttggccctccgatcggtacccagcaggacctggccagggtctcccaggaggtggcggcctcgcagggcagactgggcccctctcctgctggggactgtcctacgccatcctcacccccacacctgtccccgctgtctcccccgcggcccctgcagtgctgaacaaggacatcgcggcctgccgcactgccaccatcacgggcacactgaagcggccgtctctgcccgaggaggagaagctgaagctggcccatgccaaggggccgcccaccaatttcaacagcctgccggccaacgtgtccaagctgcacctgcacggctcaccccgctatcccggcgggcccctgcccgacttccccaaccactcactgaccctcaagagggacaaggcgcccaagtcctccttcgtcggtgacggggacatcttcaagaagctggactcggagctgagccgggcccaggagaaggctctggacacgagctacgtgatcctgcccacggccacggccacgctgcggcccaagcccaaggaggagcccaagtacagcatccacattgaccagatgccgcagacccgcctcatccacctcagcacggcccccgaggccagcctccccgcccgcagcccgccctcccgccagccccccagcggcgggccccccgaggcaccccctgcccagcccccaccgcctccgcccccaccgccaccacctccccagcagcccctgcccccaccgcccaatctggagccggcaccccccagcctgggggatcccggggagcctgccgcccatccgggacccagcacggggcccagcaccaagaacgagaatgtcgccaccttgtctgtgagctccctggaggtgaggggggcaggggtgggccacaccccagccagcgagggcagggctgcagcagctgggtcacccctgctgggtgggacccccacgccgtcagcggggcgggctggctctgcctcctagctacaccccccacccctggccctgctgggtgtgctgtgtatgtctgacgtgtggtccccaccctaggcttggcagggtggtctcaccccgtttcaaaggggctcagggacccacagtctggacccacggagcaggacctgcacctcgcacagtcgctagtccagcccttggggcagcctggcagcacatacctgcctaggtcagcctggagcctgcagctgacccagcctcagtcagcctgtaggatgttgtttttgggggagcccgtccccacaggatatgctcccaccatatcctggctcctggcctctggtgatgctgccctgtgtccctgagttctctgtcgggggacccagccatgtggccccaagttcaggtctccttgatcctggggagtgtgtcccgggtaggcgagccggacaccccagcccagccttggtgctgctcgctggcacccagcgcatagctggaggagctgcctcagtgcgcccccaggcatgtcccctgggtctggcctggtccctgaaggcaggcatggggcgagtgagtccctgatgccctcagtctgaggcagggagaggcgtggacttgtcagggacccttggcgaatgttcgcaaaccccttctccctgcagcggcggaagtcgcggtatgcagaactggactttgaggtgagttctggtgtccccccccaccagacacttagggccagatgtgctctgggctcccacacggccaggcagctccccggcagccaggggacgggcggggcaggcaggatgggccatgccctcctcctggcccaggactcactgcccagaccccgcctgcagaagatcatgcacacccggaagcggcaccaagacatgttccaggacctgaaccggaagctgcagcacgcagcggagaaggacaaggaggtgctggggccggacagcaaggtctggagggcagggaggggcggggtggggagagcccttaggtcaggccaccgtctcccttcttccctggatttgtgcacttcatccatccatccatccatccatccattcgttcattcattcattcattcgcccatccctgagggctggcctgaccctgccatgccagactctggaggccatggccatactgggagctgagcggtcacgagcctgctcctggggccaggggtctggattggggtggagccaatccagggcagggtccccacagcctgacccgaccgtggggttcgcaacctctgccaaggctggggagaggatctgtgcctgccgctgcccagctctgttctgggctcttgtcctgaaagcctcatcctgtcccctgtcccctgtcccccacctcccgtcccttcctcactgattcgtgtctgcctcctcccccctactcctcgggctcatggctctccctccgggccccacccctcctgcaccacgggccacccagcagccggaaaagcagcagacgcccaacaagaggccctgggagagcctccggaaagcccacgggacgcccacgtgggtgaagaaggagctggagccgctgcagccgtcgccgctggagcttcgcagcgtggagtgggagaggtcgggcgccacgatcccgctggtgggccaggacatcatcgacctccagaccgaggtctgagcgggtgggcggcggccacgcactgggccacggaggagggatgctgctccgcccgctcctgccgcagacgggcacagacacgctcgcgggcagcgggccaggcccgcaccccggcctcagggcgctcagacggcggccaggcacagggcccgcagtgctgggaccagagccagatgcaggacaggaggcggcccggccagcgggcacagggcaccagaggccgaaggtgcctcagactccgccctcctcgggccgaggcccagcgggcagatgggcggacggctgtggaccgtggacaggcccagcgcggccagcgtcccagggtacccgcctgagctcctgctgcggaggagctgcctgcttggcccggccggcctggcaccgttttttaaacacccccatccctcgggaagcagccagctccccacaccttccagggccctaggcccctcctagacccaggtggagggcacagccctccgaccctcatggcccccaggggcaggactgagtcccctccaggaagaagcaggggggaatctattttttctctccttttcttttcttcaataaaaagaattaaaaacccatctcctctctgtgtggcctccctctgtgcggcccggggccctgacccagccctggctgctggggtgaagtcctctgcctggccttggtgtccccgcatccctgggccaggaggactgtggaggccaggtgggccctgcagctcctgctttgccctgggcctggacgtctgggccttggactcccaggccagtggtcacgtggctcccaaggcgtcccctctccctggggctctgggaacattcagggaaccccaagtgctggtgcccttggctacccccgacccttagtacgtgagcttcacacagctcttaggccccttggtggggacacatttcactccccttgttccttgagtcattttcaggagggacagcatgaacacaccaattctttaaaacagtctgacacagtggaaatgcgtgtgggggcagggactccaaggcagggaggaagcctccctctcagcgctcccacctccttcccgcccacctggggctctgccctcctctgctcctgcctctgccctggggcaggcacagttctgggtcccctcttcattgctggggcacttcctgtctccaggcctcggccccgtttgtccggggaggcatggggagcctatgtgaacacccctaggccatcccccaccagcccagaaggaggaccctccttccacaccctcctcccaccccaggagctttgagatgcacgtcctgcttccctctgtgtctccagcagggggcagcctgaacccccgaagggagcctagttgggggaagccacaaggctggcagggacaatagcggggaaggaggggcccccctccgactgtgtgctgcaccctgcagggccccaggaccgggagaaaatgctgcacagagcctgggcctggagagcaatgcgcgccaagctgcagaggcggctacagcctagcaccccctcacccctacaacctcaactgtgccctgtcactcctgaccccagagtcctcaccagcagacagggcgggacggggaaggtgcttggagggtgcagtgaccacagtgaccatgggtgatcacagatggtcacgtgtggccatgactgactgcattgagtgggtggacgttgagcagatgaccgggaacggggtggtgtgtctgcagtagcccagaggagatggtgcaaagtcaccgggttccagcagttgagaagcacagtccctgagctgtggatctgagcaccccagaaaaccagaatgttttgacgagattggacaacaaaacctgatggaaaccgagtcacactacatatctaaagctcctttgaaccgctgcacgcacacacacatatgttctgcagcagggatgctgatgcactttattaggcccctcccaggatactaagtgaaatatcacacacatcacaccttctttcttaacccggacagatcccacttggcaccagggtttcagatgagaggctgtggactgtggtcccttcctcatcctaagttacgg

SEQ ID NO: 15 - DNA, 190556 bp, Homo sapiens
  source 1..190556: mol_type = genomic DNA
ggtgtctcccattatctgatgacaattttatgatgaaaagaaaccatgctggctttgttcggtcatggagatgggaaaggtccgcatattcagcaatctgttgaattcttccaggttaaaactggagctgagaaaaacctgcagctgcctgtccctcccttcacctcttccagcgagaggcagtgggggactggagagctgatgaaatggcagagataaaggttgtaaattagttttccctgaagccgaccagcctgagcaacaggataaaggtcgttattacagacagcccccggcctttggagttcacagtttctccattgctaggagatggaactctctggaacccttctccagctccacagagaggctcaggctatcagaggatctgagcggttgtaggctgcaggcacaagttaaaaataatcacctaacgttttgacagcactttctttttttctgtcccacagagattggaagtcattttcttatcctctttaggaagtatgttggattcaggattcttaattcccatttaaagtcaggacaattgagataactgtatcagctaacatttactgggtgttatgttatacttgctaataataatcatagctaacatttactgagtgataatttttcttaatagaaaatagcagcatttactgagtgccacatattttccaagtactgcctgaagagccttggatctgtcctctaatttattgttacagccctgaggaggaggaactattaacccccattttgtggatgaggaattcgaaaactaagagagatcaagtaatttgcctaggagcacagctggtgaatgttggagaaagtatgaagcggtaaatattacttaaatcacatagcaaatatagctgtgactgcaattctagggtgtgtgtctctgtgtgtccacgtgtatttggagtagatcggataaactttggtcttgggtaaactgaggcatgtctggcgaaggggctgactcttttctatcccattgagaacatcctcctggtgctggggtgggggtatatgtgggatggtgtaattgcgcagcgtaccttgtaattaattccgtagctttcactgacgtccgaaaggattagagagaaaaatgtggtcagcgcttaatatggagggcacagtgggtgtgctgctttctcttttccatccctctgtcaacttcattctcttttgggggcaaacaagactcagatctaaacagagtttatggtttgttttgcattttgtatttattaatatttatgccgactttgaaggtgctgaccagaaggcatcagtaacacacacacgcacacgcacacacaccacacaccatgtctgtttggtttgattctgagcctgagatcctggaaatatttcagctgttgttaagaggctggagttaggacccaggaaggacacagcagtggggatataaatagaaaaggagaacagaacaaagtttgaggagagagacttacatcactcactccccctccacccagagagcaggacggaggtgtgaacttgagccagaccagaaggagctcgagagcggccgcaggacaagcccgaggagcaggcgggcgctccaggggaaaaccacgcacaaaaccttcttcagagaaaagggaagctccaaacctgactgagacaaacggaggctcttgaaataaaaagaaaataccgcaggacaaacagcctcccgtccccgggcgcaggtcgcggtcacagtggtgacctgggattgctttcccaggactgcgagtcgggtttgggtttctcctccctgcattccacagctgctctggtcatcgcaacgtgtttattgatcactgaagaatctcaagttttgagacgaggaagaaacacccattaggtctccaagacagctgtgtttcacaaactttaaggagacagaaattttctcccctggaacctgtgaaaatgtcccttttccaaggaagtgaaggttaagaggtcccgttctcacagaccctcaggaatttcacttggctccgagctttgacctccgagagagccatggaaaagctgctgcggctgtgctgctggtactcctggctgctgctattttattacaactttcaggtaatgtccccaagtggccaggatggcgacaggcttggtttctccggaggctttccctgagtgtgtctcacactgtggtcttttgtgcgcaggtgcgtggcgtctactccagatcgcaggaccatccaggtaagagtgtttccttctcactctgagcaccgctctccccctgcctagtgcaggtatctcaggaacagcccacttgttcatctctgaggcatcagcgaatggcccttgttgggctcctggtccccgacctcactgcctcaccacacactgtgaccctgggcagctctgctacccctcaccggctgagcggtggatggagaagtggttctgggccccttgagctgggtcatatgaaacattgtgattaaggaaatatgatcttcatttgaatgccttctgcctctttctttctctctttctctctttcttcctttcttcctttttttctttttgagatggagtcttgctctgttgcccaggctggagtgcagtggccgcaacctctgcctcccgggttcaagcaattctcctgcctcagccacctgagtagctgggatcacaggtgtgcaccactacacccagctttttttttttttgtatttttagtagagacagggtttcactatgttggccaggctggtctcgaactcctgatttcaggtgatccgcccgccttggcctcccagagtgctgggattacagatgtgagccaccacacccatctcatgtcttcagggcagattcactggtggggagttggagctctggcccatagcagggtctcgggacctccagcctcagagtgctgaccagcttagcctggagcagccgatgagtgggactcgggatagagggccacccttgctccagccccagagccacattccattggccattgtgacacccaaccaggaagcatcaggacggggcttctctcgggaagacagggaggcacacacccttcgctgttaagagtgtgggcacacgttctggtcagccaggggcagggatgggaagacgaggctttctgggagcagcaggcagtcactgggctgttgctccctgctggaagttgcaggaggtggggaggagaccctgctagtgcctgaacccctgctgggaagcctgttgtgagcacagcctctgcccccgccccaccagagcttggctgggcacccccccgagcgctattgtatggccctgcctgtctctgatgggaaatcagcctttttaaaaaaattatttttgtttttattttttgagacaaagtctcactctgtcacccaggctggagttgagtggtgagatctcagtctcggctctctgctacctctgcctcccgggttcaagcgattcttgtgcctcagccttccaagcagctgggattacaggcccatgccaccacgcctggctaatttttgtatttttagtagacacaaggttttgccatgttggccaggctggtctcgatctcctgacctcgggtgatccaaccacctcggcctcccaaagtgttgggattacagatgtgagccactgggcctggctgggaaccagcctttaatgatcaaccacaaatggactcaggccagcactgtgggcagatcccagggcgatacccaggcctccagggagagcccctttcctggatggagcaccaggagcctgctggggtctagggccaggggctgtgccctcagcctctgtctcctttccggctgcccggcagccccatgccaggatgttccaggcatcgtcgcctcgccaccacctccattcaccaactcgggggtggggacgctgccacttctgtttcgtccacatgcatagggagctccttttaaaaaggtgtggaagctgtgagtttccacacattcccctctcctcagccaaatcgctgaatgaaacaagggctcctgtggcttgggaacgaataaacatgcccagcgctgcgttaaagagaggacgtgtccaccttggacaccttgcttctcgtgaatgcaggcctcatggcttgggctgggctccagtaggggagaggactgagaggaggagaggggtagcccctcgaactgcagggcggtcaggcagagctgtgcacccggctcctgcagcaggcaggtggcccccgaggccccagcatggccctcactgctgctcagtgttggagaaaagctgtgcgggttctccccggacttctgcttatgatacagagcccacacgcattctcacacatgcacatgtgtccacatgcccccccatgctacatgtctacatgtgtcaacatatgcccacatgcaccaacacaaatcacacacatccacacatggtgacacatatgcatacacacacacaccagatgtctacatgtgtcaacatatggccacatgtgccaacacacatcacatgtccacacaccactcacatccatacacatcagacatgttgacacacatgcatacacatgcaaaagcatccacacatatgcacacacctgcatgcatcaacatgtgtccacatgcatccacacatgtgtccacacaattcacatgtgtagacacacatgcacatatatacacatccatgcacacacccacacccacatgtgccaacacatgtctacgtgcatcaacatacatgtatttacacatgttcacacatgtccacacatatccacgtgtctacacacatgaccacacagtcacagactacacacatccacatgcatccacacacatccatacatttctacacacatgcatacacgtacacacattcacaaaagtccacgtgtctacacacatctgcacatgctcgcacatctctacacacatgcacatacatacacacatgctcacacacgtacaccccacacacgtccacacacactcatatgcatgcacgtgtccacacacatcttcacatactcacatgtgtgcacacacatgcacacacaccctcacacattcacacacatcccacatccacacacatgtacacctatttacacagctcacatatccacacacgtacacatatgtacacacacatgcacatgtgcacttgcatttttgtatctaaacttgaaggagcagtttgaactcagtctttgttccatatagaagctttgttcttccaagtctggatttagggtagaaatcaacatttcctgatcaaggcactgtcttagagaaacgacggccatgctgatgacagtagaaagggacggaagggtgtggtgacccctagtctgtgtggaaaagcacagtgaaggcggccatgcctcctgagctcttgaaaccgcaaggtttctctctcctcagctttccaggttctagcagtccctctttttctcctcgtccttcctcgtcctcctctcactgcaaattgtttttgaacttttccttttttctcttccttcctccttccttcctttttagaataatggtgaaggtggacacatttgctgaatatttaggtgccctccatgaacaacacatcctgctgcctgccttccttcccttcctcctcactgttcccctcctccccttctccccttctcctgccttctctctcactttgtttcctgtctcattttcttttttccatttccctccctcatttccttccctccctcccccctccctccatcctatccaatcctttcttttttttttgagacagactctttctctgtcgcccaggctggagtgcaatggcgtgatctcagctccctgcaacctctgccccctgggttctagtgactctcctgcctcagtcacccgagcagctgggactacaggcgcccgtgaccaaggctggctaatttttgtatttttagtagagacggggtttcaccatgttgaccaggctggtctcaaactcctgacctcaggtgatccgcctgcctcggcctcccaaagtgctgggattacaggtgtgagccaccgcacccagccccagtccttcctttttgtcttctcttccgacatctcaggctctgctcacctcgtttcctgctgaaaagccgcatccctggctgtctgtgtgaagcagaatctaggggcctccttcatgctccagcttccatccttgaggctcgcctgcccccgggcagctctggcagaggaagcctggccctggcgcgtctcctcaggagcgctcatgacgggcacgggcgtcacaaacacaccaacagaaacaacctgtttccatcgcaagagaacagctccttaacacgtagcatttcattctaaagagtgctaaacagctatgaaaagcggccagtttgtctgcacgttgggcctttcaatgattttacatcatccttgcgagagccctgcggtggtgtcacgccctcgcaccgcgggtggagaagcgtgtctttcagacagaccaagcgatttgctcaaggtcacagggctcagaggacacaatattaagcccaagaagctcacagcgtgaggggaattaggggagacagacacagacagagattcttggaaaacagcagccgagtggtcagtaccgggacataggttcgctcaggtgctgggggagccttaaggaggagtctccagtatagagcgagagcctgatcttccaaacgccagcctactttccaccacggccacaccaaactgtagtattttgttaaaggttctcagaactattaagcatttcttgttttctgattctggcactcagcactgtgccttatgcataggagacacgcaataaatatttgttgggctggcgcagtggctcattcctggaatcccagcactttgggagcctgagccaggaggatcacttgagcccaggaattcaagaccagcctgggcaacatagtgagaccccacctttataaaaaataaacattcagctgagcatggtggtgcatgcctctagtcccagctacttgggaggctgaggtgggaggatcacttgagtccagaagtttaaggctgcagtgaaccgtgatcacaccactgcactccagccttggtgacagagtgagaccctgtctcaaaaaatatctatatatttattgacttgtctgtgcacagtcactgaagatttgctagtcatctggtaaaccgcgtcaataaagctagccaaccagcatgcattcggctcacaggtggctgttttggcttgtattacctggtttgcctgtctacactggcagaggtagccagatatttgccagatctttaccatgtagagaggtgtttcattttgtaagtaattgccaaacaacttgaaatcattttaagcctttgcatactctgtgcttatctgtgaccatagatggtcattctggaggcattatagaatgtcgtagttgagggaccgtggggactattgagccacttctcactttacagggaagccaggaggtaggtttggagagggaaatccagggtcggcagagtccgggcccctccccacatctggaagcttttccagggcctcaggcggcccaatttcttgcctctgctccccaggggacagccttatgaagctgtgatggttgattaatctgaatccataaatggcactggccaataaattgcaggccattcttaaaaagtttataagcatgccattttatacatgacatttgtaatgaggaaaagagaacttaaaacaaacccaaagcatgtcattacccagcagtttcctggtcctggggcacatggcacagctggctccagccgtttccagaagtttggggcggctcacttcacccgctctatttaggggtctgggaggccaagcagataattacagtaattatcattccttagatctccatcatgccttagagtttctaaagaactgtcagaactgctaggccatggcagaaactggattcttcatcttcatagtatttataatagaattttaaaaaaacaatgtttatatccgattgaagaaatggaaatttggcaaatagagattttctaaatactagaattatacagataattatattctatgtttattgatttatttatttatttttgcattttatcattcattctacctgtatagttagtttttaaattgctaacattaaaaatttgggagatttcaaatgcaaaaatctctctctcacacacacacacacatacacacacacctcctgggccccttgtcttagacatggaggatacaatgtaaatagaacattcaaggaacagagtctgatataggagacaacacacaaatatactaacaaaaaaatcccaaacaatagtaaatgccatgagaaaaccaaataaggacctgaaagaaagagtggatggtggtggcgacgaaggggtggcatgaggggaggggtcctgtgaactgagacctgaatcaggatgagctacacaaaacgtggggatcagcattccaggcagtgggaacagcaggcaaagttatgcaggaaaaatgagctccatgtgttggaggccaaggaggatggagccacgaagccagcccgaccatcggcaggggccggcattcctctgtgtgatatagattccagctggaccaagtcagtgcaacactgaagattatttccctgcaggaaaccaagggataaaggtttccctgaacgcacacaaggagtaagtaacagggaaggaagaagaatagggaaatctggaagaaaaatggaaaaggaaaaattaaaggttttattaagttgttttgagtattaatactctgtctttcatctctctcctatgtctgtctctgacacacgcacacaccaaacttaataaaacattacatatggatgataaattatttctgaagaactgtggtgatgtgggctgaaaatacccctttttctctctgccctttcctctctctctctctcgttctttctcttcctccccacccctcctccattttctctctggctctgtcccctgctacttgttttgcaggctggggttgttttggagtcctcaaatgggccatggttttgcttggctggctgacctgcctaagaagacgtttagtctttagaagagtttggtgaaaatcaaggtggttgcagagttaggtggtctcatgccaccttctcaatgggaaaaatgccacagagtgcctttttcccgaaagaatgagactttcttgctctgatgaaacttgtaggactatgagttattttactccttgagttggaaaaggaacctgtgggctgaattcagcccatcccattagcaccacacaatgttttattttaaaaaattgctaacattaaaattttgatagattttgctttaaaaaaaaatctgaatttctgactctgctttaaaaaatgaagacctgacaatcctgggcaaagcttcctgcagagccgcaatgcttcgttcggcatcaggaggcactacttaatttagacagggcacagttttccacgtcgcctccgcctctcctgccctacgactgcagtggtgccagctgatggtttccagcatctgctctgatgagtctggcctgtgccttccagcttgttaactaccttggatgccatccctggactctgtccagtcacttctcaggactcgccgtcccctgcgggtgtcacagcttgcagccccttcattgcttgtttccagtcagtgttgctagttgcaaaacatctgtggcaactgaggtgttttacacttgtctgaagtgcagtggtgtggagagaaggcagtgttctggcctcaaccctgctcttctcatcactggccacctatgaactctggctggctttggggtgaacgagacaccatcactttactctgtcagcctttctgccaggactgattgtggccatttgtaaatggaaagaatgggaagggctttatcgtccacagggtttattttataaagatgaggattctgaagacacatctgttctttgtataacagatgttatttccttttacaattttttttcccagatgacttgaataacaagtcaatgaggttttgtcctcttcaaaatgaatatcctagactttagggggaaaaaaagcacagtgggaatgaaaatgaatctttttgatttttgcatttcagattcttcatattgcattacaatagtagaactatccccactggaaatcaactgaagtcaggccttactttctaatgtgctactttatctagatagggctattttatttagagagtaacaagacacttaagttattgtttagatacttctctttagctcatattacagagttaactttgttcctggcttacattttgagcttgtgtacataaaactggagggacagatgcaaattgaaaagtggaaccaaggaacaggacacgtgtggatgttgggcgccctgtgaacaaaaattcagatattacatggggtgcgtcagttatctgaaaatgatggtatgttcataactacctatggcacttcaattgtgaaagcaagccttaaaatatttctaaaggaatacagattgaaaaattcaaatagaggcctggcgcggtggctcacgcctgtaatcccagcactttgggaggccgaggcgggcggatcacgaagtcaggagatcgaaaccatgctggctaacacagtgaaaccccatctctactacaaatacaaaaaattagccaggcgtggtggcgggcgcctgtagtcccagctacttgggaagctgaggcaggagaatggcgtgaacccgggaggcggagcttgcagtgagccgagatcgcgccactgcactccagcctgggcgacagagccagactccgtctcaaaaaaaaaaaaaaaaaaaaaaagaaagaaaaattcaaattcaaatagaacagaaagataatgcaatgtaaatcttcttcttacatctcgcactcagcttttcgatttcttcactcccaaaacagcagtattggtttctgcagtatctctccagacatctctctctcttcttctctctccatccctgccctgaaccaactatattttacacaaatagctcatagtgtacacatttttatcatctttttaaaaattagacaatatcaatgaaagaatatgccatctaagttcatttatgaaccttagtattcgtcccagctgtattccagtccagagtgtagatgtgccatatttatttagccagcgctctgtagatgagcatttaggctgttctcaggtttctgatactattaaaaaattctacaacaaacaagccttgcacagaggtctttgatcatatgtatgagtgtatctctagaataaattcctagaggtggaattactagatcaaagggaatgtacacttaaaattgggatagatactgccaaattacccttcagaaggggtgtactgatttgaactcccatcagaaatgtggtggaagttgccagcttagtatagctaactttttgcttgccagtctgatgggtgaactctgataggctcattgttgtttaatatactttttaaacttatgagcaaggttgggcatcacttgatatatttatacgtaatttttatttctttttcattgaactatttgattatctcctttgcctcaatattcggttggttctttttaatagtaggagttgtactaatataatacgtttaatacctctaaaaagaaatcagtacccttctgtaatatgtattatataatacatattatataatatgcacagaaaactttgttttctgattgtgttttgttttattttattacatgtaaattttgatctatctggaaattgttctggtataaagagtgaggttgggatcttaattttttccatgtggtgaactggttccaatgtctttgttgaataatatttctcctctaatttaaaagaccagctttggggccaggcgcgttggctcacgcctgtaatcccagcattttgggaggctgaggcaggtggatcacctgaggtcaggagttcgagactagcccggccaacatggtgaaaccccgtctctactaaaaatacaaaaattgccgggcatggtggtcggtgcctgtaatcccagctacttgggaggctgaggcaggagaattgcttgaacccaggaggcggaggttgcagtgagccgagatcgcgccattgcactccagcctgggcaacaacagcgaagctctatctcaaaaaataaataagtaaataaaaaataaaagaccctctttatcacaaactgaatttccatatgtacttaggcatctttgtggatttttctcccgctgaactgtctatccgcgtgtaacaatcagccatctttattgtagtttcatgctgtgccttatcattgagtgtgaatctcctctctttatcctcttctgtttcttctccagattttctttcttattttttatataaactccataatcagatatgtcccccacaaaattctctcagcatttttacaacaaattttctaatactcatagattaaagtatagtttacgacattgagtcggcttttccaagaataggttgaatccttcatgcattcgagggtgctttcacatccctcagaattattattttttattttcttcatgaaaatcttgtacaattcttattcttgttttcataaatattttctttttgttggctgcacttaggagaactcttctttttttgtagcattattgttggaatacagaaaagcaattgacatttgtatattaaatttgtacaagcctccttgctaaattcttttgttgtttgtaatagtgtttcactgacgaaattcttttcttatttgtaatcgttttccactttggttatcaggcatacatcatttgaaaataatgatcttattatctcctctttaaaaagtattttttttaaaaaaacaaggactaacatagagactattagtctgtccttttctatgatctagcagtcgcttggggcagttgattattgtttagtcatctgaaccattatttccacttctgtgaatgaatcccagaggactaatccccgagaagactaaaattgtatgcataaagccactcatgtcagcgccacctgtacgaataaggatggaagctattgattgttcattaacagaagaatggcataacatgttatggggcagccactcaagagactgttacccaaactcaattatgagggttagatagaaacaaagaaataattcatatagcattcaatgagaagagcagaatagaaaataacatacctgcataaagttatgtttactcaaagtataaggatcacgaaggaaatttcaaactgagtaatgcttagtgtggaggaagcatagagggaaaatagaatgaccaggattaaattgagaaagtgagtattgcgtctacaatgagctggcagtgtgattttgtgcaagactttcatttcctgtctttacaaataggctaagaattcaattttcttatagattattgttagcatgaagtgaggaagtgcttgttaaggacctcagtgtctggcataccattcatgttagttttctcctcttttaaaatgattttacccttatttgtttctatagtgtgattgcattgatattaactctaaaataatggtaaataacagcgggatatggaacattcttatcttttcctgacatgaatgggcaagcttctagtgtgtcaccagtaaatgcagtggcttctgttttcatgcaacaagaggcatctattcctatttaccctgttttgtccagttaaggaactatttaccaacttctaatttaagagtttctttttctaaccaagagtgtgtgttgaattttattaaatatgctttcagtatctcccacagacatgggatccttttactcttcccccataatgtgtgtgctaagcggttcttaccctctggttctttcctctctaatgatgatttaaaatttttattcttttttccccaaggatttcaggtgttggcgtctgcttcccattactggccactggagaatgtggatgggatccatgaacttcaggatacaactggaggtagagacgcgggtgctgagagcggctgtgggcgcgggaatcccagggccatcaggaggcgtgggtgctgagagtggctggccttgaaatcccagggccattgggggacgtgggtgctgagagtgactgtgggccggggaatcccagggccatcggggagcagatgtggacacaatctgctttgaagccacggtgatagagatgaacaaatacttgtgtaacttcccgtaatagttatttcaaagcttttttttttgtagagatggggtcttgctatgttgccaggctggtctcaagctcctggcctcagcaatcctctggccttggcctcccaaagtgctggaattacaggcgtgagccactgtgccaggccacgaagcattttactagaatttttatagagagagctattgcgtattgaatgggagaatttctgattcaaaatatgattaaaatgtgcattttccccaacaatcttgaaacagaagctggcctgaggatgcctctatgtgcaagtcaggcgtctgttttctacgttgaatggactagcgtcatctgcacactgaccacagcaggggcctattgatgaagcagatgtcaaaggtcatgccaactaagaccaactcacatgtttgaagggcccccgtttcattcagcaaacgcatccccatctaccagtcagcttccccacacatcagctccatttgaaaagattaagcatcgcctaagacgtttccagtgaggcccaattccaaatagtctgtttgagttcattcagacatttgctggtaggagaaacctcacatctttctgggtatttttttcccctttctaataaggactttttaaaaaccgtaagctttgtatgacagttttccatttttatttttatttactgattgctcttgatcatgtcagatggctgacatgggcggcgagggtttaccgtacagcaatcctagcacgtgcttcggtcgtccctgttccgtgggaggcgttttatttttaaaaccatgtattgctggtgactgtgatttccacattgacacactggcattttccttactcctgtgatttaatgtgttgctggacatcaccgctgaagcttctgaaatgtttccttaaaatttgcaaactgagacccatcggtgctgcctctgttgctggtgttctcagactggggcgccgttgaggagcacgcgctccgtgaagggcacctgcgtgggtgccacgcgctccctgcccagcatcgctctcatccgcctgcctgtagggcagcaacatggccacatttggaaaccaccctacagccagatgtcttttccaaagggtcggcctggcagggctgagaaagcccttgtgcaagtttgtttcaccactggctcgggttcaaacgaaccacgttcccttgttggcatccagttttcttttttcaaggcctttattttaaagccatggaaagggggtcatttcaccaagtggaaatgccttcttgaaacagctcactgttccaggacccagcaactaaaatgctaggagttttttcaaacaaaagcttgaataactgtcagtgtctttctctcttcacccctatacctgaactcattgtggtggcttaaatcagtaactcttggtgctttgaaacctttacctatgaaaaattcttctcctaaggtgatatattcacacagatacagttacacactgtggctgaattttgctccctgaatatattgacttccagtaaagcactaatatatccgtgttagtcctggaacattgcaatgtggaaggtttctctgcacttccctactggatgcattctctaggttgtaatgctatgctggcatatttgaattgattacagccttcttaagggagaaaagaaaagaatagaccccatcagcacattttgctgcggggaacaggtgaatagctttggcaagccttttgaggatgtgcggctttgtcgtttgttgccgaactctccgtcgttttgtccatttgtcatcatctcacgcagtcattttcatgcagagtgtctgtctcatcagttcttgtgacatcataaccattcatccttttgttgagcctgtgttatgagtggccaagttcaatttcatatctctcaactaagtatctgcctatgtgttggagccagaaaattagaactatcgcttgcggccaaattcagcagccatcacgccctggtgtgggaactgagtggggccactggagtggccgagctgctgaccaaagtaaacaagggtggtggaggctgggggatgtgaggtccgaagagaaagtccagggtgctcttggatgaaagagcccctcctggtgcctgctgcaggttgagagatatgttggtcccatttgtcttttgtctcactcacttgctgtgctttttctttttgttgtttcacccagcgtcccgaacccacaagctcactgtgcttccttcccgtaatgctacttttgtgtattccaatgattctgcctactcaaatctctctgcaactgtaggtgagcatttatgtacttttgttcttcgttctgtcaagtttggatctacgatgaattctaaggccaattctgtttggtagtatctgaattcactatgtcttggctagcaagtgagcaaatgtcccagtcaagacagcagatccaaggtgttaaaaaataaccactagggttaagtctaaaggaagattgcaatacattagaacaggggtccccagtccctgggccacagactggcagcaatccgtagcctgttaggaactgggctgcacagcaggaagtgagtggtgggtgagtgagtgaagcttcacctgtatttacagctgctccctatcgctcacattaccgcccgagctccacctcctgtcagatcagcagcagcattaaattctcttgggagcacaaaccctactgtgaactgcacatgtgagggatctaggttgcatgctccttatgagaatctaatgcccgatgatctgtcactgtctcccatcacccccagaggggaccgtctagttgcaggaaaataagctcagggctcccccgattctacgtgatggtgagttgtacaattatttcattacatattgtaatataataataacagaaataaagtgcacaataaatgtaatgcacttgaatcatcccgaaaccaacctctccaacccatccatggaaaaattgtcttccatgaaaccggtccctggtgccaaaaatgctggggaccactgcactagaaggtatatatattctttcaagttcccaggattgtctaagccagctgcttgttttcagaacaaaacagacccaagatgagaccttttctagacatagagattgtttggatttttaaatgaattgtcttctttgggggaggaaaagcatgccattttaatggaaaattaaagttaatttaaaaatacctcatcaaacatttgatttcttataaacattaaaatcagcatttcgtctgtagctggactttaaaaaaatcattaaaagctgtttgtgaaacatatacccacaagaatcatagttaaattattgtcttatctgataacctccagagcctacatggctcaacatgaagctcaaagcaaaaggggtagtagcaactgaggcatttattagatcagcatagaagccagttctgaccctgtcaatcttaccctgtgatccttttcaacacaaaaactgactgctctttcaactgtaaggtgattggcttccaaaattaatgtttccagtcaagcagtctgacttaggggtttatacagcctagctcaattacgcaaccactagtgatccatttaaccttgcaatatataggtgtccctcagcaaaaatgggataaaatttaaaaatgagtttaaaagcagtaaggaaaaacactgaggtcccttgagtcggttatccatgtgacaatatagctggaaagcctgagctggggttggggtcaggtccacagaccctgttagctctcccgtgtgtcttcagctgggctgacggctgccgggggctcagacattctccctgacccatgtggtagcaaagatctctgagcgattatgaccccagttaacagtaaatcctactcgctcctgatttttacagtcttcacttatttattctgtaaacgatttaccccacacactcaccatcagataccctggccatgggaacgggacacaagatgattggacggggcagtgcccctcgggatttgcggccagctgggcttgtcacccacaggctctcctgggactatgcaaaatgttgctcggggttttcctcctggcgcctgaaaatgggttctgctaaaatcccgaatctacctgtccaggttcaggggatttcaattaaaactcaaaaggagaaggagttcagctgtagcttcacgttcacacttgcactgaaacgttccacttggaacactcagcatgaggacgggagtggggagggctcgaaaagcaggtcggcacaaagtccaggacaggaggcggtcgccacgccacgcttggtaacccatctgttggcaaatatcacaattatcacatcatcatacgatatgatatgcaatatgaaatccatatgcaaaggtctgtatgcatttgtatataatacatgcatattatatacaaatacattaatatcatttaatattaaatttttatctgacatacacattaataatttacaatttaattactaataatattactgatgctatgaatattatcatagaataatatatgatgttataaatatatacttagataaataataatgcatacttacacataagttatttgtaggtctgacacacatcttcagacttttaatctcggaaggttattaacatatgatgttgtcatttttcttccttagatattgtggaagggaaggtcaacaaaggcatttacctgaaagaggaaaagggagtcacgcttctctattacggcaggtacaacagctcctgcatcagcaagccagagcagtgtggccctgaaggtgagtggctgatccctgcggcatctttgtcaagcatttcattctcagggagcacctgctcctctggtgactggaagatgtgaacctgaggttctcatcaattgcagaatgcgtgagaatgtcaacgatggatcggagggcaggggagggaggaatacaggcaaggaggttactaagcagagacttgtcctggtggctggaagttataacatcctcttacagagatgtgagatcaaaatacttaatcttgtaaaggatgaaaaaaaaccttcctaaaaaacagacacagcgatgtcacagtggggactggacagggccgtggcgtttgtgggaaggaaattgatggcatggcacctgcagtgtgatttctggctctgggatgttgacggtgagcgggcagggcatacccaagaacacttgcgcctggttttggttcttttacattcatcgagaggggctgggcagtggctcgaactgtcccggcaagcggtcgcaggcttgtggctaaagtcatgccatggacagagcagagatgcaaaagaaaaactggcaatcgacttgctttcgtttgcttttaccgtgtgaagtgtaacctgctctctcgtatctaggcttcaggcaatgcacgtctggatcacattgcaaattttctgggaaattgttctctgccttccaaaccagcttggagccttcaagttcctttctcctaggcaaaatgaaagttatgatttctagggaggaacaaagcttaatgcagtcctcgtaggaagctctaaggcattttggacatcagatggccttctgtgatgagttcattgtacatgattgtaggacaaaatggactttgttccagtaaaaataaacaacagcttagcaaggcaaaaacatgtgggaggacacatcttgggctttgtggaaaccagaattttgagcaatggttatgaggcccaaaaccacggtcaggtttacaaactcatagtttatgctgttcctgagttcaagcagctccataaacatcccaggcttatttatttttacaaagtaaaaaacaaccatgggctcggcgtgagctcggtggcaggggcgaggaggacgggagagtaatatgtgctccttccttgcattggattcgggaagggcgggggcatatctgtggtggctttttctgggtttctagagaacggcttctctttggagtagaggcatccagaaagctccagcaaccacactggaattgatctcatttgaggacaaggatggtgcaggtgccaggggttccaatgcctgggactatcacagataatgaacccaagaaaggagacagtgatgggaccagcgggaaatcagagctactggacaagttttatctgcacgccgaggtcacacatgagaggcctttgagctgattctggcctgtggctgtgttcggttggacgggcatcgggttaaaattttaaaattagctgtcaacactgaaaaataggaaatttccacagatttccagtttttcttgataaatctctcctgacttctctggctggctggagctaagtcgcggtggccctggacttccgtctccagttcccctcagtccccaccagacttctcgactcttcaataatcttcaggtcgaacagagcctgtccgcagcatgagctctggggccagaaggcgtgggttccacttccggttccgacctgtttgtggggatcttgggcaaccactgcttccctttgaaaagcctcatctgtaaagtgagtgaataaaaggaccttcccatacagttgctgtgaagactggaagaactattacagcatgttcctggcatgtggttggtccagctgtcgggaggccttttgggtttatcgctcatgtgtccatgattccaaacttccccttcatcactagggtatcttttctaagaacaccactttgcctgcttggagggtgacttctgacagacgggccgttgtggttgaactgatcataatagctgcatacccttgttgagccccgactctgcaccaatccttggtctaatcccaaacatgtattcactcatttcatgcccccaacatgagacacacaagaacatgggtgaagaaagagccatgaactcgggcttcatgtcccgctgttgacaatttcttttgtgtcatggttaagcagaacttttaagatactgttcatgtggccactttctttagagcatggccagatataaaccgggggtgcggtggctcacacctgtaatcccagtgttttgggaggcagaggcaggatgattgcatgagcccaggagttcgagaccagcctcggcaacacagtgagatcttgtctctaacttaaagaaaaagaaaagaaaggaaacaaagtcaggaaaccttcaatcaacgctggctcggtgagaggctgctctcgtgaggcctgatgcagacgcagagggtaggtggggcatttctcactgtgcccccctgggtcttgagttcagcctcacaaggtgaccgggccatgagcctgtgcgagggccatggcatgcctttcccgctttcctctgctgtatccttggctcaggcggattctcctggggccctgatgagcttgtacttctgtgtgcgggaaaacaagccgtgaacagggaagacctgcccagcattttccaaattaaagtccctgtagcaggaggcagaggaggccttctcagggggcacctggagcaactaaaacaaaaatcaatggttatgtttttattttaatatactgggcgcatcagaaacgagttttcacatatattatttaagaggagacttcagtgagcattgagctttaaaaatgggtagatttaaaggaaaatattccctaataatcataattcaggtgttattcagatctcataaaaattgtgaatgattagaacgtgggaagcattgaattagccttttcagatgtgttcagcgagtcctccgccacacttattggtgtgggcacaaacttataacctgttattcttataacgaaaaacaacgcttaaatagagaaatgctctccagcccctgcctaacaggcccactgcttttatatttctgatttccaaatcctgatgtggtctctgttcatattttcagcgattttttaacaaataatgttttaggggacagggttgatgctgagaaatgtggctgtcccccgagggtgcccatagaaggcagaggtccctgctgtggccctgctccggacccccgctcccggccctccctccacccctgcttcttccagagcctctctgctgcttgtctgcctgccttcattctaggagctactgtgggtcctgtcttttggcaaatggtgccttctggggacatgttcttaaggtcacttgctgctaatggggcaagctttggaggacattggagagaaaaaggctgtttggatccctggccattcttgaatgttaagcttagaaaacacagtctgttccctcaatactcaggattctgtctttcaactcccctgaccagtgagcacacaggtggggaagctgaaaataggaaggggcacttgctggaatgttctggcaccttctttcacctacctggagaccttgaaggctcagctcaagtgtaaactttacggggatgagctccagtccaggtgagttcctctgtctcatgcccttattgctccccctacatttcttcccacaacttgcacggccgacgatggcctgtcacttccgtctcccttacttggtcttcagctcagtgaggacgaggactgagtctgccttggccagtgatgagttctcagtgcctggcacaccatagatactgcacactgaatgcatctccatccagggtttgctgcaccttcacttgaatactgaacaagggccattcacgactcctagagaaatcatttcccctacattgaacctatagtcaatactgactggacactcaagcatgttgctaggaggtagatctcatgtgaagtctgtgaccataataaagttaaatgaaagggaactgattgcataaaatccaaaaaaggtcatttccagcatcaaggtgcagattattaggtaattcttccttgcttactctcatttctacctctgatttattgctgtgtcggttaagatgatgttatttgatataacaagtaaaaacacagacaacggcagaaaaagaagcccattccgctattggactcctctgacttttagtgtgttatttctgatattgggctaaattccgtctcgagtaacttcggcccattgcttctagttccagctctcctgtgaatggctttggcagctcctgggaaaggcagcctccccgattagcccctcagcttcaccttcctccctctgtgaatgtttcctttgctttttcctcacatgcattaagaacttcttctgcttataaaccccagagaggctgctgaggtcccgaggcagcagctggagcatctccgcacggccatttccctcttctcagctttgagttgactttttccccctttgcatttgtttcctaaatttaaaacgctgtcaacaatttgctaagatacttgcaggtggagttttaggatagaaatttccagaggggcctgggggacacgggcctggcagggatctagctactctcttactcaggcgatctggggtcagggggcttggaggcctgtggagcagatgatcctcagagaagcattcattcagcacactccttgaacagatggggaaactgaggcccagagaggatgcaagatgagcctgagctgccacgatgctgtggcacagtgtatctccaagtacagctcgtaggccctgggtggcagcaactgcaggttcccaggccccaaccaggacgtgctgattctgagtctcagtggacaaggcctgggaatcggcatttttagccagtctctccaggtgattctcgcaactcatgtgataccacatcccggaatccgcggctgactatacgtgcttggtttggtgggcgccgtgttgatcttctgtttttagagtgagactttctacattgtctcctgccaggtgggtggatccaaataccccagcccacgaggtttccagaaatggaatttctcccggtgctttcagtgtttttcttttaaaattaacattcaattctggcaggacacagtggctcacacctgtaatcccaacactttaggaggccgaggcaggaggattgtttgaacccaagagtttcagaccagcctgggcaccacaggaagaccctgtctcaatgaaaaaaaaaaaaaaaatttagcagggcgaggtggtgtgtacctgtcatcctagctactcaggaggctgaggtgggaggatcacttgggcccaggaggtcaagcctgcagtgagccatgattgcaccactgcactccagcctggaccacagggcaagacactgtctcaaaaaaattcaacctttatatatgggaaaatttcatttaaaaatctacacttctgacttctcttaaaatatgagaactgctcccctgcaccccactggcagcagttggtcaggggtaaggagtgactgccccttaaggcagggccagcattttccagttttcctcagcctgcaggactctctgctgtctgtcgctgtgactgaaggtggtggccattccccaggatggcctgcgtgtggctttgttagaggagcagggaaaggggaaagggaagaatttcttattcccatggggaaagtgggtgtcctacagccccagtcatttcaggaagcgattagagtggggctttggggtgggggtgtggagtgagaattttaaaggctcgatatgcaaacgagtgtctcctcctggccacaccaggcacagggcccatgaggcagccgggaaacgggctctgagtcttgcgtgaaagcgtatgggacgcgcatcctcgtggctctttgggaaacgtggtgggccacaggctggtccgggtgccagaacggccatcagaccctgtccctgccttgctccagctctgttctcaaggctgctttcctggtgtgggagcagcatccgctcagaagctccaagttctggttttgtcaggtgagcctgcccatgcctgggtcagtcctggtgattctgataggcccagcccgagtcagccttcagctgtgtggtctgtggtgactggggtgtgggtacagacgccaggcgggcccgcatgcctgtataacctcgcgccctcctgggccgctgctttgttggcatgtgttgatcatgctcttgcagggtgctgagtctgtgggcctgggaagggcagctgcatgcatgatctccaagggaagggcgggagccacagcacagtgattacaaacgcagactccagatccaggctgcctgggttcaaatcctgactcgtcccagaccagctgtgtggccttgggcaagttaccgcacctccctgtgcttcagttttctcccctgtgaaatggggacagtaatgacccctagttcacaggttgttgggaggatttaacctcagcccatataagttctcctcacctgctagaaatcatcctttgtcttatgccgtggtctctacatatgaagggaattaacttctcatctagtaaatctgtgacaaatattctttccctggatggttgtctgtctttgagtttgttacggtaattttttttgccttgcagaatattatatttatgcacttaaatttattagtcttttcttatgactcctagatttttatttttcctttttttgtcttgtcaaaaaagatctttcctcattttattttttggatgttttaggattcagtgcttataacaagaaaaaattatcaaattagtttgtcaatattgtgcttgtttctttttccttcagatttttccttgttgtattgatggcccaactccatgaggcaaagttccttaaaaggctaatatggaaggcacattgtgaatttgttatgactctatgaagacgtgaattgatacttaaatataagctgttgctcaggtagaagtcattgttttgtgcgttgagttaactaaatgaaaagcttggttaccggcaccatggatggccttcgatctacccttacctaacaccacatggaatttttttatttttatttttcttcctgaacagaaagacatttggccaagacaggctcattttgaattgagtgaaagaaattttaaaatgcagcaaagtttttggaaaaaattaacttccatgaatcctactgggaatttgtttcataacaaaaatttcacaacgcactgtgctgacttccttgtgaaacgggttgtttctgagtgtgcagggaagtggcgggaggcttgggggtttgtcctggcttctgtacccctcagcgcccaaggcagggaagtggcgggaggctcggggggttgtcctggcttctgtacccctcagcgcccaaggcaggtgttgcaggaagcccgttcatgaggtgggtgtgggtggtgccagccaggtctggggacaccagcgtcagctgccccaggcctctgtgcaacccccacagtcgcacccttttgcggtaacccacattactgggcactcgggaaggctgttttctttcccaggagccctaaggacagatgccgcagggcttggagttgtaccccgtagcctctcagaggtccagaaaggtccaggcctcttccaatttttttgaggttcttcttctcttaaaaaataaaatggggaaattccataccagggttataaaatgtatgctgtgtttttcctgaatcctgcgagggctttgaactcacaaaggtatagttgtcttgatatattgtcacaagacatttgaaggacttctaacagatatgttaattcataaggcatcacagaaagcatggtgggcaatgagacactgccttatacacgaatgacaaatgtcttctttgaattcagtgactctctaagactgtgtccataacctcatgtgaaggtaaggtctaaagtctaaatttggcaccatttatagaaataaagcccagggcaaatatccttctgcctctcccctgcacccaccgtcccatcatgggcctctttggaccagttctgggcacgtgttctctctcagcaccactgaaccctcttacccatgtgcctgggccaggcttggcgggggtgaggcagctggatgtatttccagctgtcaggggcagaatccagacaggcagctagtgtctcacacacacacacacacacacacacacacacacacacacacacactggagtttacacacaaagaagggccaggtgggcagatgctactggaggcagagaagtggaatagagacaaccagagctccaaaatgcaacgccagagaggcccaagctccacagagcctccagccaggccctgccctgacttccccttcagcagagagcccggcccccagaccagtgggtgtgagtgcagaacagcggtcggggtgggtgcggggcatgctcaggagctgggcttttgcggttcctctttttttttttttgagacggagtctcgctctgtcgcccaggctggagtgcagtggcacaatctcggctcactgcaagctctgcctcccgggttcacgccattctcctgcctcagcctcctgagcagctgggacgacaggcacctgccaccacgcctggctaattttttgtatttttagtagagacggggtttcaccatgttagtaaagatggtctcgatctcctgacctcatgatccacccgcctcggcctccctaagtgctgggattacaggcgtgagccaccatgcctggaccctcttttttttgagacagagtcttgctctgttgcccaggctggagtgcaatggcgtggtctcggctcactgcaacctctgcctccgtggttcaaacaattctcctgcctcagcctcctgagtagctgggactacaggtgcatgccaccacacccggccaatttttatatttttagtagagacggcatttcactatgctggccaggctggtctcaaactcctgacctcaggtgatccacttgcctcggcctcccaaagtgctgggattacaggcgtgagccaccgcgcccggcctgcagttcctcttatagtaaaaacatggagaaatcccacatgaggatcataaaaattacattgtttttccatgtttacattgatcacagtaggactttgcacccacaaaggtacaatatctaattgtcataatttactgtaatatactgccacaacacatttgaggtatgtcctatctgctgctggtggcggaggcaacatgaactaatgagccagctcattcatgctaacatgcgtcgctcagaccatttagtccaggtgcaatccctcctcccccgcagcgtgggcctggggtcaggacttaccacgaatgtgcagactagagtcttgaaaaaggtttcagctgctgccccctctgtatccaactgcgggaaatgaacaattgaagatatcaacaaccttaaaagtgtgcttccctttggcaagaaatgccctcttgggaatgtatcctaaaggcatatagtctgagatatgcaaaagaatttgcttcaagttctgtttgaaaatttcttcaaaaagtggaagaaaaccttaagatccagcaacaggggattgctgtttaaaaaaaagactgtggtgcttgtttagaatgcgccgctgtgcagacataaaagtgacaacgtgacagtgtatttatggacatcggaggaagttcacggtggagtaaactttatagaaatgttgtttataaaccagtgtgcctgagatggttcgtgtctttgtaaaatctatttatagaagaggcttaggaaggagccgccctaaccacatttctggaggaataggagagaaacctggagggtgtaggtcttcacatttgcatgatcccggggagtgggggcggggaactgcctggggctgcagcgatcttcatcagtcactggtgaccttgagtgaatgagcctcagttccttcatctgtatagtggggatgaagcaggatttttgtactttttaaaaggcgagaattcatttcaaactcctagaaaagtgcctggcactgtgtgagcccttaataaacatgagcaaatatcactgtctggattttctgaactgaacatacactgcctttagaatggggacaaaatgcttttcgaatgaaaaataaaaagcaaagagaaccatgtgcttgcgagaagtcaagtcccctgctctctgtgaataactgatcttgtgactttcctcaggggtcacgttttcttttttctggaagacacaaggagaacagtctagaccaatcccttctgcgtatgggggacaggtcatctccaatgggttcaaagtctgctccagcggtggcagaggctctgtggagctgtatacgcgggacaattccatgacatgggaggcctccttcagccccccaggtgagtgacagcatcggtcccgggaggctctgcctggaggagtggagtcttctctgagaatggacgctgagaagcccaacgcagcccaaggagcccagggatgctgctgcctcctggcacccgagctcctttcctttaagggttgttggggaggtgcatggggagaggcaaggaggtgcccttggtaagccgcctttggttggtgcagagcctgggctccgtctgcccgtgcactgtgtgcctgctgtaggttacctgaccacactgacctcagtgatcacacctgtgatgtgcagatgatattgacagtacttacctcacggtttccaggacattaagctgaagatatggtgtgcaaagtgcaagcagtggttacatttctccttcttttccttctcattttccctcttcctcctcatctgcctcctttttctctcacagtctttgtctcttcctctttctcttcctccccctcctcttcttccttcttcttagtggtatagacttgaaattgtttaaagcatgacgagaagaagcttttggagagagaggctgaagaatcggggagcagaggaaggggctaggggagagcgcatgaagcactggactgtgcgtggtcttggaggagggaggggccctggatgtgtgggaagagaacaggagtccctgcacattggctgagtttgcaggtgggtgttgagacatggacgtggggcagtaggctgcagaggctgacgaaggtctgaagtggaagctggagaaggggaacaggtggctggggacacagaaggactcagggtggcatggagtgggggccaagtcaggactggagcccaacaagggaagggcagaggtggagggggcagcacaaaagcctaggatgatctcctccggtaggaaacatctttgatgtatttaagggaaatccattttctggctcattcttaagggaggctgcatggcccagttattaaaaagcgtgaactctggacccaaacaggctggatcaaatcccgcctctggacgttggtagttgtgtgaacctgggcaccttccctaactgccctatgcctcagtttcctcattcataatatggcagtaatagcagtatcacatcatagggtgactgtgagaactaagtgggctgctaggcataaagcgtggaatgatggcacagtgggcccagaaggtgtttgccttcttctgtggatgctcggtgtgctcggaccagcttgtacctccacctctgtaaagtggggcagttcagcaaacatctacttcaaatttgccctctgtgatccctaaggtcagaaataatctctgcctccctcccctgacacagaaccatctgaaccttttccgtgaccttcctgttccacttgctatcagagtccgattgtaagcagcttatctctctgctccttggggctggtggaacgtggtttcaggcatccattaggttctttgaccttgaacaaaggtaaagtatgctcaactctggctgcttttccacccagggaaagggcgagaattagaaacacttctggctggcaatgtgctctcttttgtgcattgaaggcgtttgttattcttactttcaaactcaggggcaataatactttggaccaacctagggtccaagcgtgctccagagactcaaaattatcagaaagttgcacaatcttgagcaagaagccctgatgtcattctgggtgatctaagatgcatagctggctagaggtgatgtgtgtcctttaaaagggctgccctgttccttccagcagcaagctcaggaggacagcttaccacacatgctggcagaacaaagggaacctttgtgggggaatcaacagtcaaagtctgatgaacattcttgttgatgagcgtggttcttgtgccagagagaagagtaacacaaatgctggttgatggaggttcctgaatgagcagggaggttggtcttccctctaccaactcactcccatgttggttaacattatacgccctcgcttagagcacaggctgatgccaatggcctgtgggctgagttgggtcctcagatgggttttatggtcctatattgtgattgcctaggccaagtttgtaagaaaaatatttggaatgatttacgatcattagttatgattttattttaaaattaagattttccaatttcttttggaaataaaaagactggcaaggcaggctcttcatctctcatgttactgatgggggaggtgagtaggggccacctcgtgatggggcagccgcccttccacgcactgcagtcagcacagaagccacgtcctcagggaaagctcgttactgtgcttacccgctccctggcctctgcagactgggttggtgggcgccatggagtgcctgtattgctgttagattttaatagattttattttttagaacagttttagattcacagaaaaattgagtgcaaagttcagagaattcccattaccctccgcctctacacaggcacagcttcccccactatggacattcccccaccagaatgatccatttgttacatgtgatgaacctacagtgacacatcattgtcacccaaagtccatagttcacattagcatttgctctcggtgttgtacattctatgggttggtgaggttgatctttcgcccattttaaaaattggattgtttttctttcttttttccttcctccctttcttcttcccctcctctctcttttccttctttccctccctcccttcctccctcccttccttccttccttcttgccttccatcctcccttgctcccttcctttccttctttccttccttctttcttctcttctctctctctctcactctctctctcctctcttctctctttctctctttctttctttttctttctgacaggatctgtcatccaggctggagtacagtggtgcaatcacagcttactgcagcgtttaactccagggctcaggtgatcctcctacctcagttgcccaagtagctgggattaccggcatgtgccaccatgtctcactagtttttttttttttttggtacaggtgaggtcttacttggttgcccaggctggtctcaaactcctggcttcaagcgatcctcccatctcagcctcccaaaatgcgggtcgtttgttttcttactgttgaattttaagagtttttgggtgtattttggataatagtcctttatcatgtcttttccaaatattttctccccatccgtgacttgtcttctcattctcttgacagtgtctttcacagagcagacatttttagttgtaaggaagtccagcttgtcaattatttctttcatggattgtgcctttggtgttggatctaataagtcatcactaaacccaaggtcatctagatgtttttcctatattatcttctaagggttttatagttttgcattttatattagacctatagtccattttgaattaatttttatgacaggtttaagattttttttttgttttttttgagatggagtttggctcttgttgtccaggctggagtgcaatggggcgatctcggctcactgcaacctccacctcccgggttcaagcaattcttcctgcctcagcctcctgagtagctgggattacagacacctgccaccacgcccagctaattttttgtatttttgtggagacggggttttgccatgttggctaggctggtctcgaactcctgacttcaggtgatccacctgcctcggcctcccaaagtgctgaggttacaggcgtgagccactgcgtccggccaagattctttttattttttggaacgtggatattcagttgttgcagcaccatttgttgcaacaaatggttctgtttgttcattgtactgccttttctcctttgtcaaagattggttgactgtatttttattggtctatctctgggctgtttattctgtcccacagatctattcatctgtttttttccaatgccacactgtcttgactactgtaactttttatagtaagtctggaaattgggtagtgttgttcctccaatgttgtttttctccttcaatattgtattggctattctggctctcttccttctccatagtttatcaatatccacaaaataacttgatgagatttttattgggattgtgttgaatatatagatcaatttgggaagaactgacatcttcacaacattgagtctttctgtccatgaatatggaatatctctccatttatttagttcttgtttaatttctttcatcagagttatatagttttctttatatatagcttataaatgtattgttataatatatgtatttctttttccttttttggcaccaatgacaatggtaatgtgttttttaattgtaaattctacttgttcgttgctggcagatggggagcaattgacttgtatattaaccttgtagcctgtaatcttgctatgctcactcattagtttcagctttgttgttgattcttttggattttctacatagacaatcacatcatctgtgaataaatatagttttattgcatccttcccaatatttatattcttatttccttttttttccttttttgccttattgcattagttaggactttcagtacaatgttaaaaaggagtggtaaaaggggacatccttgtctcgctcctgaccattttttcttaactgagcttatggtctgattggttggcacttgtgccctgccatttttcaaatattttaatcacacttgcttgtgggcatttgaatttgtaactactatgttaaaataacaaggagtctccttgaactgcttctggaatttagggcataaggacaaaaagataacatccttcctgtgctccaaaggactggggaaagtcaggtctgtgttataccttgtattaggacgcaccacagttaacagtgattgatcaccttaagaaagaaggatgtgcctacaaacaggaaaaacctgtgcatggggagctcattcccacagtactcagaatggcgatcttcactcttttccaggcccctattggactcatgtcctatttacatggaaatccaaggagggcctgaaagtctacgtcaacgggaccctgagcacctctgatccgagtggaaaagtgtctcgtgactatggagagtccaacgtcaacctcgtgatagggtctgagcaggaccaggccaagtgttatgagaacggtgctttcgatgagttcatcatctgggagcgggctctgactccggatgagatcgccatgtacttcactgctgccattggtcagtgagtgtgaagggctggggcagatccgctgtctgttcccagggtcaccctggtatcggcctcctttctccccactctcccgttgcagctatcagcactgcaggcgtgagatgtgtcctaatgaaccttataaacacagttgtgtgttagaacacctgttccctgagatagaggagttaataatttactagagatgctttgagatgaatattgttctgttgatcatcacggggtttcaaggtatatgtgatggacgattatagaaggctttggagagcaagtattccagatccattagtgtttttgatcaacaaatgttagccgtgtgcctcccaggggatgggcccttggaaagccccgaagatacctcttcctattcagcacagggcagttgttcggggcaggggcctgtgggtaggtggactggggttcaaatattcattgtgccataatgagccgtgagactttgggaagtcatttttaaaaactgaggtcaaattcatatatcataaacataaccatttaaaaatgaacaagtcagtacacttggcacattcacggtgttatgcagctgccacctctacctggcttggaaacattttcatccccccaaaaggaaaccccgcacccggtgagtacagtcactccccgccttcccctcccccagactctggcaaccacgaatctactttctgtctttacctattttggagattccacataaatggaaatgtgtaacgtataacctttttgtcttaatctctcagattttttttttgctctgttaaatggataaaaatactccctttctgggggaggtgttgataataaaggccattagcacaatgcctggcatatggcaagaatccagtggttcttagctgtttttaaaattaatattcatctttcccctacaattccattttcatgctgcccacaagtgaatgcaccattttttccccaatgggtttctttatttccacataaaataatctgctaaaaaatgacagaccccatgtaggcactcacaaacatgtggctgctgcttcattgggacccagcacagcggatgtcaggaccaggagagaaaggcctgagttccagacgctgcctgccctcgttccgcttctgacgttgagtccctcagttgttaggaccctattgattgcatgacagaaaacccaattcaagataactttagccaagaaagccatgtgtttctttttcatctcttgcaatggaagctctaggggaaactgcttcagaactggtttggtccaggtgctcacatgatgtcagtgggaatctctgcgtttgaccctgccctcttttgttagcctcctcctggtgccaaggtggctgtcatgcttctagtgttgcatcctctgccctcagcagcctctgtggaaaagagggagcttctttctcttatcacttcccatgctggggctgggcaggactcacattggctcacatttatccatgcaccttccatgagtcattttctgtgtctgggagtgcagaatatgctgactggcttaggtctctgtcatagtcccccatccccagcccccctgaaatgacagtgaggtcagccttgtccagaacatgtggaggagaggggactcccaggggacaatcaggtatgctggtctcagaaggaacagatgctgtgcaggcaaaacagcctgtgtccactacagccttcgacatttacatcttccagcttccacccaggaaaacggaatgcattccctctcctagcactgacagagggcaaatgatagcatccttcagaagaaaaaaatggaccaatctactgcattttattgcctagggtttagagttgtcactttgaaaccaagatatcacttgtatttatgttatgaaaagcttcaaacaaagcctgccctcctgacagtttacttgttttagtaacactggaaagaggtgcccttgtttctggttcttgttcttgtcagagcaaaccctcatcgccagaaccagaactgaaccagaactggatcgaccagaatcccattgcacctggtgacctggtctgaagacaaggcatacgacgtaaagcatgtataggagaatggctcttgaagtccctggaaggcctgtgtggggccccgtgtaccactgctcagtgagtctgacacagccgagttcagggcagccatgcagagtgacaactggaactgaaatccagtctgctcccagccaggccgggcctcggtggggacatggccacacaagtaggtagaagtctttctttacatgaagacctgtctgcatttgaagctgtgctggggctgtaggtgcccagagggggcttttttctgagtgacctgggcagaggtgacacctcctctaatctcatgagccagagctggcaccatttgctgaccggtccgtccaggtgtggtggcctttcctgatacaaaggcacagtgctgaccgtctgtcaccctggccaggtgtcccctctcccttaccactggaatggacagcagctctttctgtagaggaggaagaaggttatgttcagatacgtgtaatcggaaagcatgtacctttgggcactggaaacacactcaacacgtgggaactgggaccgactgaggacctggcagattctcattttcaccccagtctccatggtcatcgcttgcaagcgttggcaggatcgctggaccgattttcactatccctcactctgctttgtggacacacacgagttaaatgtgagtttgacatgactcctctgtaactcattggcacctgaggagtgaatgtcactctgacttggagaacagagcggttctggggtccagttctctcggcagcgccacaccttctgcgttcaccagcagcccaaccccacccaaacccaagggctcagtcactcctgcagccagcaaggggtgatgatgtcatttcctcagctcatccaaagcaacttcaagagattttccaaaaatgaagtagaatatctggttaagtgtgtgttctcatcaggaaatagtgggattagaaatagttgggggtgaacaggcagagaacagcaaatcatggcttagtcttcagccttaaatgtcttcattgtttgtaataattcatcattaaccccatgggggctgagtgcaaagaatagctggaatccttgggctagagggggctcaggaagacagttttctccactgctttactggggcctattctcacttcatcgatctcagaggagagcgctcccagggctcctgtctgtgctggcccagcgagttgtagcactcctcattttatctccaaccagtctggatgcaattgaaatctatttcttttggttctttatttatttgaaatcggtaatccttgtataaaatcatcttttgatatgctgacttgcatgaagggtgttcaaaagcgattgagaatacaaatggaaaagtaatgtgacctgggaaaatctatacggtcgactcagtcagctgatttcttagcccataatttatctccagcaacattcctactcaaaacattctcagactctcttccatgtgtctgaagccagtacatttttaacaaggacaggtcttcctcgtggtgaaaaaagtgaccatgttttagtccttaatccagcattgtttcttccaggaaagcatgctttattgtcttcaacgctgccaagcctcttcatgacatccacagcaagccccgtggtgagcagacacatcttccttggtcccccttgctgatgttcttctgcttgggctgtttgctgggagagagaaaattccattaggtgtctgggctctctgttatcggcagtacattgtctgggaagaaataacaaatggaggggaagccaactgcagtactaattcttggtgctaagagtgactgaagggaaaactctcaactcctgccaccaggaacctcaggtgcccaaaaggaaataccgggctcattcatgggacgtgggcgccgtgagtggggagtgaggaatctgccctgcttggcttctctctatgcccttttcgtttgatgttagagaaaagttcaattcatatagaaaaattcttgtctggaattagtgtttgtagttaaagaactgtcctttcttgagaacgttaatataatagtgagtgcacagactctgacccatctgcttgggttcaaatccaagttctaccacttatttttgagtaagcctctctgcgcttagtgtcatccatcaaatggggacttattttgtaaggttgttgtgaggatgaaatgttaatataagcaaaatattcacaaaagtgtcagatacatggtaggagctatattactatcatggtataaaaacatttgaccagctgggtgtggtggttgcacctgtagtcccagctgctcagaaagctgagacaggaggactgctcgagtccagcctgggaaacacagtgaaaccccatctctataaataaaaaaaagagcagccaggcacagttgctcatgcctgtaatcccagcaatttgggaggtcgaggcagaaggatcacttgaggtccggagctcgagaccagcctggccaacacagtgaaaccctgtctctactaaaaatacaaaaattagccaggcatggtggtgcacgcctgtagtctcagctacttgggaggctgaggcaagagactcgcttgaacccgggaggcagaggctgcagtgagccgagattgcgccactgcactccagcctgggcaacagagcaagactcagtctcaaaaaaaaaaaaaaaaattaaaaaaagcattcgacccagagtaggacacattaaacttctgtataatattttggttttagttcttagtagaaactcatgttgccaatttctttcagatgcccacagatgcctaccatcccatcataaccaacctgacagaagagagaaaaaccttccaaagtcccggagtgatactgagttacctccaaaatgtatccctcagcttacccagtaagtccctctcggagcagacagccttgaatctcaccaaggtaaggctatttgatgtctgtgtctggtggaccgggcgtggcacccttaccgggaccatagatgtttctgtttgacctagatcgagtttaaaaaaagcaggaacttttactgaaacgtttgggtttcaggcttctcatgaacaaccagctggtgtggccctcctggccagctctgtacagctcagcggagcttcctttatgggcacttgagtctttgctgtggtttcccaatgcccaacctgcctggtcccccctgtgcagccacctggcccccgcgggcgtgtggttggcaactcctagactaaataaactctgctgcctcctggcaacaggtaaaaggtggagaggcctcactggcagatccagccgtggggcgtgggccacagcctgtgcacagtgggagtccccaaagctatctaaacacttagagaatgcaacatttatggcattaaaatcaagatggtttctctttctgctcctccaaatagtttccaggtgaaggcagagggtggatcgtgggctctcgtggacttgctgtcttctgttttagggctagggcttatcttggtggatgcgaagacagaaggggttttgagattggctcaccttgaaagcacagcatatgggttaggagcagggtatatgaagtcccacggctgcactgacctttgatctgcagttactctgtgtccttggtcaagtgacctaacatctctgcctcacttggctcctgagatgtggaggaaataataacagcgcccacttcatcggggataagtgggttcctatgtgcacagaacagtgctgggtacgtggtgagcacttttcaagggttcttaattcttactgatttccttgctgaagtcacacccaaagaagcacatgcagagccatgtgttcagggacttgagacatcttggaatggagggaggttgccctcagcttttctgtccacgtaagagaagttagacttctcagatttcattcattcattcattcattcattcattcattcatagaccatactagattctgggagtgcaggatgaccaagtgctaatactccctgctttcaagaggctcagggttgagggagtgatgacaggtcatggagtctgagaggggctttaaagggaactacatggagctgcgggactcagcggtcctggagtcacagagacctggctttgaccccagctccaccactcccggctctgtgtccgtgggaaggttatttaacctcagcacacctgcttcccactgtgacatggggacagtgagatcgcccatgtgtctcaggtacttctggctgtgagaaacagggccctctgcttagcggacttagacttcaggccatgtactcgcttcaggcaacaagaggcccagaggcgggaatcctaggagtcactaactcagtcttcactcacagcaggggctggataggcaccgccacaattctctcggcactcggcccttttctcgcccagctgcaggcccccagcaccctcgccttaccctggcacgtccaggagggaaagaacgggtcgggagactccctcctcgtcagggggaaatctttcccatggttccctttgctgagacaccccctcacatctcagtggccagagctgggccacatgaccacacctgggccaatcactaaccaaggggagtgggattagcaaccagctcagccaatcatgaaggagctctagggtggggccaaggctgcccagtgtgggagcgcttccgggctccgaagggaaggacccgcggggtgttgggtggaaagagcgggtatagacaagctggaaggtccttatgcatgtatgcacaggaccgggcgtgaggccccgagacagggcttggtatgcagtaagtgctttattaatacgaacactcttgtttttgttgagatgggctacaaggggtgactgtggcaggcggtgccttctatgcagttagcacttagtaaacactcacactccgggcactagtgccctgcctgtagctaaggtatgcagtcggggcttcatgcccacttggcactggcaccctcccctctagccgtggtacacagtcggcgctcaataaacacccactctgggcacgggcgccctcccgtctgactagccatgggtaccctgcagcatcctcaggaatgtgcagcagacacttagcaggctccctctgtgtttccgggtgtctagggaaggagggagtccgagtgaggataaattaattagacgaatgttgattaaacacctacttgtgggtgggttgcttcattaattataaaatggatggcttaatgagccacagttgcatgctcatgagtgggttcactgatgactttattaattaagcacattgtgcagcctccgctctctgccagatgctgggcttggtgctggggatgtgtgatggatgtgccgggcattgcccctgccctcgtggggcttgtggccaggggcatgtccagttagctggaaagctgcctgtgggatgctggtcctaaaggtcactcctcagaaccttctagaagtgtgtgtcctgccctagggcaggccggagccactgtggcccaccgcctgcctggctctgtgatctcttcatcacgggctagaagggtctgtctcgcacctgacactgcagtggcagcagttagccgtgtcattgtggcccacaccacccagcaggtccctgaactgagtgtgatagggtgtggccaggctggcaggtctgtgggaagagttggtggtggggctggcaggagtgagacagggacaaagtaggacaagcagaacttggggccaaggccagacaggcacgcaccccagaaaaggccaggcagggctgccctctgcggagcccaggtgtgggggctggggttgttgggtggggatggcgtatgcgcagtgaggtgggtggaggccaaggcagctccgtatccttattggctgtctggtttgcaacacaaggcaatgcaggtctacacaggaaacactttctttttaagcttggtcacttttactttccttgctgcttttcttccttctctccctcagctatacctgagagtcagaggttgcaaactcatgtggcttcaggggccaaaggaaatggatggcatgggccagacagagcaacagtggggagtagagagaggtagtggcagcctgaatgcaccgcctcctctgcagccagcagttgctagcaactcaaggccacctgtctgtaaccgttagggtgactgattctgattttgcaagaaaaaccccagacctggatttttaaaatggaacatctcccaattttaagaaatgggcagtgaactgaaatcttttttttttttcaacctgttttattttattttttttaattttttattgatcattcttgggtgtttctcgcagagggggatttggcagggtcataggacaatagtggagggaaggtcagcagataaacaagtgaacaaagaaacaagtgaacaaaggtctctggttttcctaggcagaggaccctgcggccttccgcagtgtttgtgtccctgattacttgagattagggagtggtgatgactcttaacgagcatgctgccttcaagcatctgtttaacaaagcacatcttgcaccgcccttaatccatttaaccctgagtggacacagcacatgtttcagagagcacaggtttgggggtaaggtcatagatcaacaggatcccaaggtagaagaatttttcttagtacagaacaaaatgaaaagtctcccatgtctacttctttctacacagacacggcaaccatctgatttctcaatcttttccccacctttccccctttctattccacaaagccgcgattgtcatcctggcccgttctcaatgagctgttgggtacacctcccagacggggtggtggccgggcagaggggctcctcacttcccagtaggggcggccgggcagaggcgcccctcacctcctggacggggcggctggccgggcggggggctgaccccccacctccctcccggacggggcggctggccgggtagaggggctcctcacttcccagtaggggcggccgggcagaggcgcccctcacctcctggacggggcggctggccgggcggggggctgaccctccacctccctcccggacggggcggctggccgggcagaggggctcctcacttcccagtaggggcggccgggcagaggcgcccctcacctcccggacgaggcggctggccgggcggggggctgacccccccacctccctcccagacggggcggctggccgggcggggggctgacccccccaccaccctcccggacggggtggctggccgggcagaggggctcctcacttcccagtaggggtggccgggcagaggcgcccctcacctcccggacggggcggctggccgggcggggggctgacccccccacctccctcccggacggggtggctggccgggcagaggggctcctcacttcccagtaggggcggccgggcagaggagcccctcacctcccggacggggtggctggccgggtggggggctgaccccccaacctccctcccggatggggcggctggccaggcggggggctgacccccccacctccctcccggacggggcggctggccaggcagaggggctcctcacttcccagtaggggcggccgggcagaggcacccctcacctcctggacggggcggctggccgggcggggggctgatcccccacctccctcccggacggggcggcttgccgggcggggggctgacccccccccccggacggggcagctggccgggcagaggggctcctcacttcccagtaggggcggctgggcagaggcgcccgtcacctcccggacggggcagctggcctggcgggggctgacccccacctccctcccggacggggtggctgccgggcggagacgctcctcacttcccagacggggtggctgccgggcggaggggctcctcacttctcagacggggcggctgccgggcggaggggctcctcacttctcagacggggcggttgccaggcggagggtctcctcacttctcagacggggcggctgggcagagacgctcctcacctcccagatggggtcacagccgagcagaggcgctcctcacatcccagacggggcggcggggcaaaggcgctccccacatctcagacgatgggcggccgggcagagacactcctcgcttcctagatgggatggcggccgggaagaggcgctcctcatttcctagacgggatggcggccgggcagagacgctcctcactttccagactgggcagccaggcagaggggctcctcacatcccagacgatgggcggccaggcagagacgctcctcacttcccagacggggtggcggccgggcagaggctgcaatctcggcactttgggaggccaaggcaggcggctgggaggtggaggttgtagctagcccagatcacgccactgcactccagcctgggcaccattgagcactgagtgaaccagacaccgtctgcaatccccgcacctccggaggctgaggctggcggatcactcgcggttaggagctggagaccagcctggccaacacagcgaaaccccgtctccaccaaaaaaaaacgaaaaccagtcaggcatggcaggctgaggcaggagaatcaggcagggaggttgcagtgagccgagatggcagcagtacagtccagcttcggctcggcatcagagggagactgtggaaagagagggagagggagaccgtggggagagggagggggagggggagagggagagggagagcagaaatcttaaatgaaattatgtgcagaccaaatacaagacatctacgaggcaggctcagcctgtgtgccatccctgtgggacccctggtgtagacctgttttggggtatctggctggggaccctggggatgagtcatgcagatttacccaaaaccccagtgatctctgacctgatgagaagtcaaagtttttggcatccattatacaagttagtttctttcttttttcttttcttttcttttcctttctttttttgagatggagtctcgctctgtcacccaggttggagtgcagtggcatgatcttggctcactgcaacctctgccttctgagttcaagcgattctcctgcctcagcctcccaagtagctgggactacaggcatgcaccactacacctgactaatttttgtatttttagtagagatggggtctcactatgtttcccaggctggtcttcaactcctgacctcaaatgatccacccgtctcagcctcccaaagtgctgggatgacaggtgtgagccactgcgcccggccccattctacaagtttccatggtgtcctggcttctcacctgtccactagcagctggacgggaaaatggcaaggggtcatttcctgtactgtaccgtgaggcagtgattagctacgtgtggctcgtccaactagagatgtgctgtgagtgtaagatgcacactggatttctaaaactttgtgcaaagaaaagggaaatatctaattagtaatttcatatggattctgtgttgaaatgacaatattttaggtttttgagctaagtaaaaatacattattaaaattagtttcaccttttttattctacttcttaaaaatgtgcttgctgctagaaaatttaaaatgatagatgtggcccatattatgtttctgtgtgatagactgctctggatcaagagtcggcaaactatggccctcgagtcaaatctggcccgttgcttgcttttggaaataaagttttattcatgcatgcccatttgtttgcatattgtctgtggctgcttttgcactgccatggcagagttgagtgtttgtgacacagggcgtgacccatgaggcctgacctcgttcctgtgtgacactttaagaagtttgctgcccctgctccggctcagtgaaggcaggatggtgattattccctatttcattaattcttaaggccttgcactctaaggtctcaaaaagcatttatctcataaagataaacaaatgcatgatgagttttgatgatgtgctctaagaatttagtgtctcagagtgtgaggaagaacgtgagtattctggagatggcggtttggtggaaatatgggagagttcggtcagcctctaagtttaattctgatgctgatagttggagacaaacagttaagactgtgtgtgaataatgcagatgagtgaaacggacatgagcgtatgaggcagtggggatggcggggtctggagtgggctggggacacatccactaagccggtgccgctcagctgtggtcaattatggttttatgggaatgtgggctaaggggtgtccaagagtctgcttttttaaaacgaagtagaaaattcacgttttcatttaagtctcctgattaggaaacagtagaaattaatttcattgtttccttagaataatagtgagccgaaccaaacatggttttaaggtgacctgaccaagggcctgagtagcttctgctttctagagaggtcattttcagtgaacacgagtgcttccacgtcagtttggtttctcgccccaagaaaagcgcatccagcaggtcatgattttcccacacgtctctccactccacgggctttcactgagggcctgccgtgtcccccaggcgctgtgctagggcccctgccgtcactgagcagtgttcattctgacgttccggtgctggtcactgactcgacagggctgccacaggagcaaataagataacgtccataaaagggcttcgtaacatatcatgtggtccatgactcagctatttttgttgactgccgtgcataaaactgaactggtggttgatagagacccattggaagatgcggggaaaactgaaggtcttcaagtttgttgcctaaggacaggtgctgagcagtgtcattttgtccacctttagaccttcttaaaagccgtgggagagatccttctactgcctggttggattgctctgtcagaggtaagagaaaagaacatggtcggtcatggtggctcatacctataatcccagcactttgggaggccaaggcgggtggatcacttgaggtcaggagtcaagaccagcctggccaatgtggcaaaaccccatctctactaaaaatacaaaaattagccaggcgtggtggcgggcacctgtagtcccagctactcaggaggctgaggcaggagaattgctggaacctgggaggcggaggttgcagtgagccgaggttgtgccactgcactccagcctgggcaacagagtgagactctgtctcaaaaaacaaaaaaaaaaaaaaaaaagagagagagagaaaagaacattttgatcttcaaaacgtatgtgcctcgggaaccattttgtcttcctagaagtggcataatatggcccagtcacatccacaaaaagaatgatgtatctcccagtcctgacatctgggatataagagctcattttgagtagacatgcaactgattcagaatgccttgtcctctaaggcaaaagaaatgcacgtgtgtcagtaatgtgttactgtcctaaacatggaagaaggaaatgatggttttttccccatgagaaatgtgtacttggttcatcctggtcatttcatgtaatatgtattttttttttctttaccatcccatcattcttgaatgacaatagaaagctttttatgttaaaagtcactggatttagtaagaaaaaggagaatacatgacaatatgtacttcatgattaaggtgcagaaaaaaagcttctcttgttctctttactcaaaatagctagaaaggagaatgaaataatttttcctatatttctgaaaataacttgattgtacttatttaaaaagaaaacaaataaatagttgtggagaagttagaaaatgcagataataaaaaacaaaataaaaatcacttcaaatcctaaaactgagattattaacattcttgtatatttccttatagtctagttttcaattcacttatatatgtattcaacagatatactgtatatttgacttaatttgtttttccttaattatgtcaataacactttccaatgatactaagtattcacctgcaacactgtattagtcaggacaggccagggtgcactgcagtaacaaatagatccctacatctcagtggctcagcacagtagaaatttacttctctgccatgcaaagtccagagtgagtcagaggagcctcttctccacccagatactcagggatcctggctccatctgtcttccggtgctggcttctcaatatgtggtttccaaggttgccaggcaggggcagagaagggtgaggaggactcttaactgccttggcccagaagggtcccaaccacaccaccatgatattaaagtgctcattctcctaagccctgataatatttgaaaatgtttgccagtttgagggcagaagtggcattttattctctcattattaataagattgcgttagagtttacatttgataaacttttgtttgaataatttcaagtggaatgagattaggtttaacagtggcaaagggagaaaaaaaggctcaagaatgtaagatggatacagtcttacctagaaaacaattcctttttaaaaggtttgacctctttcatgatttcaaggggactttgtgtccaaagctgcaggctgggaacacccagaggacagccaatggaagtatccaggcagacgtattttgtgcatgattttaattaactgcttttgaatgcaaaatatgcaaatctgttacaaaatatgaataaccaggaaactgtccagactcaggcagggtccaatatgcattaaagagaatgcatgaatcggtctctaccccacagaactgcatgccagaaacacagacttccatgtgcttaactgggcctggtgactgaaatcaggctatgggcctaaaagcaaatatctaaaattggcctcagcattctatttccagctcatgaggctcttctgaagtgcgtgtttgtgggagaatgctgaggacttagcagcaggcaggtgcttccccagaaaggcaggaagagaagcagtgaaggcagagctcactggcccagctcagcagggcttaagagaggcctctcccctggtgatgtgtgtctgaggatgagggccccctgctttcttgggggcagtgtctaccaggatcctctgctctggaactcagaaaggaaagagggctcttggagtagaaggcaagctcctgggaagtcaaggcagccagagatagctctgggtgccggcacctcggaagcagccacccttcatggagaaggggacagagctgctggtgtccccatcccagagtggacctgggggcgatcagcccctcctcgtgaagcacagggaggtagggggagggtctgggatgtgctgagggtccctctgtgagttcagggaggaggcaggaccaggagttgggtcccctcagtccccgtgtctaagtgtagaaatgcaggagccggcgatggctggggtgatgggtccacctgggctgtgtccatgctccgtgagctcagtcgggtgtgtggcctccgtgtggtcccctcctgatccatgggaaggggcagttgtgtgacttcttcctccctcgtggccaacgtggggaaacttgattttgtgtgcctggtgcacctgcctggtgccctggctgagtggggtggattttcatggctcctggtgcttgtgttgctgcaggacagcgccgtggtactgagtctcatcgacactattgacaccgtcatgggccatgtatcctccaacctgcacggcagcacgccccaggtcaccgtggagggctcctctgccatggcaggtagctgtcgcttgtaagggtgagccacatggcaggggcgggggctggaggctgcgtttcactgcctgtctttttacacccttagcagagagccatgctctgtctccctgactgctctgcctggcacaaaccacatttggaaggaaaacccgtggtcagatgagggcaggtgtgttcggccatgatatgcagatggggcccataagcttttcccagtgacttgggagccaagctcctgccctgggatgatggtctcggttcagagcaggaggcagaagcagcagtgcctgcaagagtctgtggaataaaaggggtggcctcgggtttctggcgtcagcttgctctcagctgggctccagggtaattgtcacagttgtctaattgtagaggcagaggtgatgacctttcgattttaaaagtctttaccaggagtgcattatcctgctgatacttcgctgcaagagccgagctggggaaaatgggctgaagctacaggggttagtttagtcgcagtttgttggccgtgttgccctcgcctgctgcgcttggggaggagccgatgtcaccgcatcgctgagcacagcccatccttgcaccggccttgagagctgggggctgtgctggggcggagggcgccccaggtgaggagccgcgcgcccgtgggccggaatgctgagcctccccgtggcagtcactgcctgggctcttcattgctttaccctttttttttttttttttgaggccatgctttctaaaggtaattatacttcccgtggggagcttgtcctgtcaaaaaagaaaagcagacggggttttgcagtctgatttcctgcagcctgtgagctctgacgggacttccgctctctcgctccttccaccgcagagttttccgtggccaaaatcctgcccaagaccgtgaattcctcccattaccgcttcccggcccacgggcagagcttcatccagatcccccacgaggccttccacaggcacggtgagtgtggctgcgctggactcccttccggggcggctccctcaagtctttctgaagagtccccaagctttgctgggtgcccaccgcgccagggagctgcggtgctcccccgggccgcctgcggtgctcccccggactgcctgtcctgtcctgcaggagagggactgtgggcagccgttctcaaagcgtgtcctcaggccaccctcatggacacgcttgagaggttccttagtgatgctaatgctgtgcccactccaggccactgaactggaatttggggtggggtctgggagcatctcaacctgctcgcctggggaatccggcccactgggaagtcatcctacctacatcctcctaaatcggcacacacctggtcagccgaagataaaaagatggggccacctccccttcctgctcaggtagctgtgggccaggtgaggggttcatctgttcaggaacctggggttccactcctgtgcaggcctcagtcgagtcacataataaaaaatgagaggctcaggggaccccctgcctctgaccagggagccctgttgggagcccagatggccctggctattttttgctacaatgaccgtcaccctctctggttcctggaaaagcgaatatgactctgcagacatctccttcctctccttccctccctggggacctcgggcaagcaggggagagcctcagatttttgcccctgccaccctggccagaggccacgcccccttcccagggttctgccttagggatggggaccaggacagccctcatcagacatctctctctgcagtggggagcctgtctctgcacccaccaccatcttgattgtctgtgggaaaggtgccccgactggttctctgccctgtcctcaactagcatgatgtcaggtgtgccctgctcctagggcagaggcagggatgtccctaccccagaagccaagggaagggcccagggacgatgccaccttcctccagcatcagcagggagggcccagggatggtgccgacatctaccagcatctcctggccgcatgatctgctgggagtgccctgatttccaatcctggcagagccgtggccgagccatggagtgaaatagcaaaagcacatgtgaccctgcttcatggctggttataatagaggtgtgaccaggtgaaggcatacagacttcccagtggctgctgcccccttgaaaacctgcattctgcctcactcagtgttgccctaaatcctctgcgtgtggagggcagacgggatgcactcgtggggcaaggctggaggctggcactgccccctgttgacttgcaggagctgtctccctgcaggggctctgagactgtgtgatgccctgggtgagcctggctctccctgcaggggctctgagaccgtgtgatgccctgggtgagcctggccctccctggggggtttcagcctccacatgtctggagctggctcaggggatggagcagggatccaccgtcacgctgctgagttgctgcagagtctttgtccttgcaaattctgcccgagtgtccttcacttccttctccccagagggttcttaggagtgaggggcagcaccatgcatggcggggcgtggggctttgtgtttttcctgcctgtggcctggagcgctgacagcgcctgcccctctgctctctctgcagcctggagcaccgtcgtgggtctgctgtaccacagcatgcactactacctgaacaacatctggcccgcccacaccaagtgagtctcgggggtgctcagctcaggggcgtgggtgtgcgtgggtttgctgggtggctggccacagggatgcccgccccacacgcacaacactgagaactctggacacgagtaccgggcgcttcactgctcgggcaaggaaacgtgaagcgttttgaaggccacttgggaactgcaaggctggggccaggctggtggagtggaggtcaggagcacgggccagaagaccctacccacccgcctggacagaactgtgtgaccttgggcaagggacttaacctctctgagcctcagtttccactgctgtgtaatggaagacaacagacctgtctgtgtcagtcatgggcaaacacacagatgggcaaagccatttcacatcagcttaagtggaaggccaggaaactgagggctcaggggactgaaaagggaggagcaggtgggcctcagtcatggctggacccggggaccccgaggacgccgtctagacctgctctgtctgccccctgcctctgctgtcctccagacaggcccctccataggagcagagctggctcctgcagcatcgcctcatgtgggtttgggtcctgagaacccagaaggagagcaaggagggtggggaccatgaggggggcggcgaggctggggaggatgagggaaatgaggagggaggggaggggatgcctctttcctgaggaatgtagtcctaaattttgtgatctggaggaaacaccgtcttctgcgtcagatttcttggggaaagcctgcatgcttaccgatttcctcctaatgaaagaaagtggggggcctgccactctttatgtgtgatttccaaaattcttcaggaaaatggtcaaagaaaaatgcaatctattttcctcaaaaagatgccatctcagttatttggggagatctttccaagatagtgaatgaaaaggtgacccttccttggcccctcctgctgaagtttccaccaggaagctggccttgctgtgaaatatatgagacgtgcatttgtgaggtgtcgctgtgtcttgtgcggccacagtgagaacctgcgtgggaaagcggcatccgtgccacggcccacaacgtcacaaaggcgggaggattgcttccagatgcagggtgcacacatttcaggggcaattcactgtgaccaccagaatctgactccagccaggtgtcagccagctctttcatgaagggccagcttgtaaatcggcttggctttccagaactctgccctcacagggtgaaggcagccagagacactacgtggggaaatgggggagtggctgccttccaatacagctttatttacaaaaccaggcggccagcccaagagctgcagtttgcagatctttgccagaccctctattagatcagcgctggcagggatgggcagaggagaggccggcggggcctgctctggggagcccacagccttgcagatggaagacagtctgtctcgcctgtccccagggcctcagccttcactctccctctgctgtcctcacggacccaggtgtctgcagacaggacactggagccccaggatgcaggccactgtgtcccagaacaatgcagctaactctgacgtccccctgcaaaccgagggcctggaaattggacagccaagtcatccctggttcgtcagcattgacaccagccccacaacatgttccatgagcagcacatttacgtgctgaagccaaagcagaactggctgtgcagcgatggaacatgtttttcatttgcagtgaagttggatcttcagctcaggtgaagctctcttcagcacttagtgcaaagatgccttgtcatcaaaattcacctggaaaaaaatcatgcaaacagctcatccagtaaagtctctgtacttgttacattgtacctgtgtaccttgtacctgtagcagaagaggtggacggaagtggaggggacaaagagtttggttcacaggtgccctccttatctgtgtgaccctgggcaagtgacttgagcctggaggcctgtgttctcctcttaaaacaggagtaataatagcactgatttctgaggattgccaggaggactgaatgagttaatggtgtaagtagggcttggttttcttaaacatgacatacaagtgcctgcttttgtgattttgtaagctgattgggcatttgtgccattttgcctttgaggtaattatcaaatcctgggcacgatgagaagcaggttagtgcagctgccgtgcgggcagcacgtttatgtgcgcacatatgccgggttcctgccagcctgcaggggacttccctccgtctttgtctttgtattgtgtgctgtcatcctcatacatccgcagtgtgttgtgaggatgaaaggatgctttggtgccgtagtgtcctttaatttcttctccagggatgagggtgagggtctaagtcagtacgtgagtctcagtgcacaaagggtggggcctgggccggaaggaacttttgtctccacagccagccccaggcagaccattccagggctcctgtgatgacggaggggatgatatctgaccacccacggcccggtgggggcttagctgcttcttgcccggctgcttgtacccctaggatcctttgagtctcactcgctgcctggccccgcaatgatggagactgttcagcttttacgggtgctcgtgctaggctcagccagcaccgggacagccggttcctccaggtggacggggctgagactggcctgctcccagtcctcctgtgaagatggaagccacagcccacagagggaagggcctctccccaggctgtgagggactcacgggtgctcgagaaagatgagtggggaggtggacccggctcagcgtgtgtccttagtcactatagagtgacacggagcaccgatggaaccagtaggtcacggttctgcagccctcagtgcagtaactgacccaggcagaagctatcagtggatgtgcacaccagcgggagcagggttgcggggcgggggacctcaccgacctgcagagtcctagctgtaccaggtcggagggtgcctggtgatggggatgtctgccgcacgcctgcagccaggtggccacactcaacattatcaacgtgggacacgttgtgggcccgtgtctcttgctgtcacgtcatgggagacgtccatgcctcctgtggcatactcctgtcagatgcatggcctcacgcccctcacgaggaagcagtcagacacacctgaactaagcgatgttgtgtgctgctgtggtttcgattgcaagggagaagaagttgggcagttccggattgggggagactaaagaggttcgtgcctgagctaatgcacattcctgggttgagagaagtggagttctggaggacgtgtgtgatggtggggggtgtgtgcagttgactctggactgtgcattagagcatcttgtagggtcctcgttaaatttctgagtgtgatcattgtttgatggttatataggaggcagtctccatttttaggagacacgtggtagagatggagtatgctgtgatgcctgcaacacaccgctagtgcttcagcagaaaggaaatgtgcatgtgtgcgtgtatttgtgtgttgtgtgtgtgcacacaggtgcatgtatgtgcttgtgtggtgtatgtgcgttatgtgtgcacatatgtgcatgtgtgttttgtgtgtgctgtgggcatgcaaatgcgcgtgtgtgcatttgtgtgttgtatgtgcatacatgtgcgtgtgtgtgtgtacatgtgtggtatgtgtgtgtcaagtgtgagcgtgaccactgccagataaagtgaacatggcaaatgataagagctgagagtgtaggtgaagcctatgcgttgtactgttttctggcagatttcctgctggtttgacttttaacagtgcaaagctgcgggggctcctggcatgggcaggaattgtggctgttgccgtcctttctgaaaggccctggctgcagtgctgctcgaaacagagaacaacgtcacctgggcagcatcggtgctgaggaagtcgcctgttaccctcgatgctgtctccttctgctgtttgcgtcagtcaggggctcagtctccttcaagaattcaccatcacccaagatcacactcagagatgctgccatgtgccaccttgttggcaagatttggagtttccttcacactgtgttcccagggtggcgttgaattctcgcgctgagggaaggtgacaagcagtgtgtgacggatgggtgaggggattccttgagcacacaggcatgtgtcagcaggagccagttatcaaggagttcctttaccagggaatattttcatttgcgatgtttgttcactccccaatgtgacatggtaactgtgaggacttgataattctccaaataaccgaataacagccctttttcttactccacttggtctgacttctttggattgagttcctgagccggtcttctgcacaggctgggaagtctctgtgtctcctcatagatttcagcactcctctgaagcctcatgtaactttaagtcccctctttgtgtaacggaaggcggagcagcagcgtggctttggctcagatgtgctgcgtggggtgaaggacgcagagcctgaccatcggtggggctccgtggggccaggtagtaacttggggcacattgaaggaaggcggatttgcaaaggtgcaatcaggagtggagagctctgggggacagcacagtcacgggccaggaacaagaatgggggcacgctgctttccccagggccagccaggcaggccctggaagagatggctttccccgggcagagatggaggggcccccggggcagcgactgtgccctggtaggctgagggaaaagaatcctggccccactatctgctccgatgccctctgaccttctggggcttcccttttgctgagcacatgaagggagagagcccagagcctggctgatgggcacaggacggggcgggtggaggcagggtataaggggcagaggaagagccagcacagcctctgccccaccctgccccacctcacccctgccccaccctgccccacctcaccccttccccaccctgccccacctcaccccttccccaccctgccccacctcacccctgccccacccttccccacctcacctctgtccccacctttactggaggaaaatgctcctaaggaggcgtctggccccattctcatcttgacttggccgacatctggcgtcgcactgattaccaaactgggcctggtggaggccacgtgttcccggagcggaatccaggaaaccactccagatttgctctcatatcatttgtgttcatagaaggttctcacttaatgttttccttatgtttttcctaagaaatggatctaagtcatcgccgcttgcctgtgagtagattcatccactcgctcactcactcacgtgtgtgctgagcacccactgtgtcaggcgtggttccgggagctggggagagcagtgaaccaaacgggaaagcatccgggccccaggggaatttctgttctgggagggagatgatgaccaccggttgcaccatcaggaaatgtccacggagggaaagtcaagggacaaatcatgctgcgtgtttagggcctgaagcccacagctgcgactttctgttctggctaatggcacagccctaagtgttgctagcaacgtggtttttccagcgcgtttggtggaattgcacacgtgttgagttcatggagctctgcagaaaaggccacgagcatcggggcactgggcacagagagtgagaaccaggctcctggctgaagcgaacacaccacacgtcttagggccttggagtcgcgtgcggggcggggacaaggttctgctgagtgagtcaggctgggcgccgcggggctttgccttggtcccccccaactttctgcggcctcgagcccaccctcactttctgcggtggggactgagcccacgcatgcccagtggtgaatgttctcagacggtgaatgttgttcttccggggaaacatctgagatactacccgggtctgcggctctgcagagtggaatgtttatgtacgttctgtacgtacagcttgtatctctgtgggactaaaactttctgggcaagtttattagaaaaaaatgtctaaaaagcctcttcagaggggctataatgaaaaaaatggttgagacacgtggacctagggtgatgctttcttttcatttttttttttttttaagtttgtgttttactccatgtgtgtcatctggactttgggcttggatcaataacatggtcacatagaggaattgccgggtcgagcagtcgcgtctgttgttactcacaggcctgagaatcgatgaccctggtttgctccagaccctgtgaactggtgatgatctgcaggaagtcgcttctgcgggaacagacagggtgttcattctctatggcgccatctttgtaaacactttgtatttacaattccaggaataattctgcgtgcttcttggaggcctgctctttctcagggatgtgtgtaaggagacagtgcagaggccgggggtgaggtgggacgtgctcctgctccatgagccccaccgcccatcccaggcagggtcactgaacacggtgtttgaatctagttagaaggaaaaacaagttgagggaggaaaaatatggtgcccccagctcccagagccctgtgggatgtcccaaaggtggttcagtgggtgtcgaaacagggacctgcaggttcctcagtcagtcagcgctttggatggtggacgggggaggtgcacaggacccgggtgaggcccacacagaagcagacggctgggtgaccgcggggggcccggtgacagcacgtctcaggcatctttgtgtagtcaccccaaattcaaattcatggaacagatacttggtgacctgctgtgtgccaggcagggctgggatcaaatcaggcaaatgggctgagggcacaaaattaaaggagctggtcatccttggggtcgtgcccagtgtgagcaccttcttcaatcttgcccttcaggtacctggcttccctcaccctcctcctggccctgaatatcttttcaagctcataaccccacgagacagccactgtagacatcagttaggcttctttagattgggctgcaaggggcggaaaacccatctttaacagttttaggccaagggggagtttattggatcacgtaagccgagagctctgcagagggctggcttcaggagcagctcgatccagcatcccattgctgttgctgggctccatctctcagcaattcccttctcaatcagtctccctcctcatgaatgcaagcagctcccagggcctcgtgcctcagggcatgaggagaagtctggcagggagaatgagggtctttgagccctcattctccccccacctcgccttctggcatctcctcagatttgactggattgggtgtcattcctaaatggtccccatggcctgagggctgcggtgcactgactgatccagacccagataccagggcttcctcctgagccaagatagagtcaactccaggctgtgtgggctgtgagcggggaaggggatggccacctagaggggaaggcaggtgctttgatcaggaaaacgatgaatgaatactgggtgggcaaaacagcagatggccactgcaccatcctataatcagggaaattgacactcagacagggtgagttacctgcccaaggtcacacagctgattaagtggaatcggtgagattcatgccctgttattttgagcatttctgctcatccatgcttcctgggccatcttacttttcttataaactctttgaggtcgagggctctgtctcacctcttggtcctggcgtcacaccttaacgagagcaggtattgaagataagaattcaagggacagagttaaaacacagaatagttgaactcgcctgcaggtaccagcttcacatcttgaaggagagcagcgggagctgaatgaaagaaatcaaagcttcatccaaagaagatttccgtctcaatagttttgggtggaacgctggctcccagcctaggttctagctgtgtgctgctcccctgcgtttcccattttgtaatgatttccgtctcttcccaaggatcgcggaggccatgcatcaccaggactgcctgctgttcgccaccagccacctgatttccctggaggtgtccccaccacccaccctgtctcagaacctgtcgggctctccactcattacggtccacctcaagcacagattggtgagtggcggtgccttcacccttgtcgccgcctttgatctggtttcacactgaggaatgctgggttgtctgtgtgcttgcataaagaatctccaacagccttggtgccggcccgaactggaatcttcctctccctggagctccttctcttgggcctttgtttctgagctgcagtgggaggcccctcgcatagtgcctgggctggccacgcggtgtcgatgttggggaagaggcgtcgaggtggctctcctagacgtgtggagcgatcacggatcttcctcatttataacaagtgtccttactggaggaggggggtaccttggccatcccagttaccatgtgtgttattagccatcagcaagatgcagcactgtgttctgttagagagaaacatgcttcagagctcaggcaaaaccatttttacgcttcaggcattgcgtgataagctcttggtcctgatgcttcataaccgctctcctctccacatgtcgtttgtttttgccagtgagtaggactgacagagacattggggataccgatgcactgccattctttagtaaaaggcaaaagatgtatacaatctgaggagaaaccagagtataatgctgccgttctttaaaaaacgcgtgcgctgttccccacgccaggttcatgtcaggaggtatggtgtttgatgtgacactgaaagagtgagatttttcaaagtgtttattcaagaactcactgtgttattggtcagaattaacactaaaggcatttcctggcaggattttctatttcattctgtttcactctgctctatggccaaggccgactctgtgcgcatacctgggtgggtgcttctgttctttccagggtgactgtgtttctgccccacctgggaggggcccacacacttgtgctgctgggtgagctggggcagtcaagagatggtactggagacggagatgggactggagtggaagatggagatggagaggggactggagatggaggtgcggatggagatgggaatggagatgcagaggggactggaattggagattgagatggacatgggaatggagatggagatggagacgggactggatatagagatggagatggagaggggactggagatgttggagatagagatggaaatggagatggagaggggactggagatgatggagatagagatggaaatggagatggagaggggactggagttggagatggagatggagatgggaatggagatggagatggagaggggactggagttggagatggagatggagttggagatggagatgggaatggagatggagaggggattggagatgagactggtcacctcagcctccttgcccttcctctctgcatgtgaccagccgtgagcctgttttcagtgtgtcccctgccttgcttcctccgcccctcccggtgtccctctccttcccagtgacttctcacctggaccagcagcctccgcgtgttctgtctgctccattctccccacagtttacagacttattgtcaaacacacagatcaggtggtgctacttacctattcaaagaccttctgggactcaaggttccctgcaggagaatttacactctgggcctgtcggcagatgtctagcaggtctttcccgcccggctttccatgcacctctggctctccttccaagcccagcagacagctgctgtcattgctggtgtcgttccctgtgcctggtgggcctgtctcacccatctgctgtctgagttcacccatctcaggaggagccttctctcctccaagccctctgcggcctgcacagaagggaacctccctccacgcggtctttgcgctgtattagcacagagtctcagctctgtatgctataatcatttatgctaatcagtaatcccttaaatggcctgcagcttctcagaggctgccagatccagcatggagcccactgcccttcccccctgcccgcagtggccttggcactgcgtggaggctcaggagacgcttgctgagtgagtgctgtgccggagtcagtgccctgtcttgcagttgtgcagttgacatttgtgtcttctctttgtgtggagagaatcctggtcccctgcacaggctgtcccctctgccgtgatgtcagtgagggtgcactccacaggctcagcctatgtttggaaatgtggctgcgacatgcagcagagacacttggagcttctgggcttgagggtagggcagtgctgccccgcggcgtgtcaagcctgtagtcaagagtctgtagctgggcgcagtggctcagcctgtaatcccagcacttcgggaggccaaggtgggcggatcacctgaggtcaggagtttgagaccagcgtgaccaacatggtgaattcccgtctctactaaaaatacaaaaatcagccgggcatggtggcccgagcctgtaatcccagctacttgggagactgaggcaggagaatcacttgaacccgggaggcagaggttgcagtgagcagagatcgggccagtgcgttccagcctgggcgatagagtgagactctgcctcaaaaaaaaaaaaagtctgtaaaggcaggaggcttgttctgaaggactctggaacctctgtgtgctctgaggttgaagttgtccttgtgagtgaggtgggcactgtgaagcacagccgaccacagggcctgagggactttgaagagcaggagtcagggatcatcccagaaggtgaggcgggggcaagtggagaggggagggcacgggcagagaggggaggcaggagatgagagcacagcttgagtgccagggctgcaggagagccacacagccagtgaggttacacagcatacatgcacacgcatacacacacatgcacatgcacatgcacacagtccacacacacccagtccacatacactcagtccacacacacccagtccacacacacccagtgcacacagtccacacacacccagtccacacacacccagtgcacacagtccacacacacccagtccacacacacccagtgcacacagtccacacacacccagtccacatacactcagtccacacacagtccatacccagtccccacacacccagtccacatacacccagcacagacacacacacacccagtccacacacaatcagtccacacacaccccatctacacccacccagcacagacacacacacccagtgcacacacactcactccacacactcagtccacacacactcagtccacacactcccagcacagacacacccagcacacaaacacctagtgcacacacacccagcacagacacacccaacacagatacaccaacacagacacaaacacccagtgcacacacacccagtgctcacacacccagtacacatacccagcacagacacacccagtgcacacatacccagtgctcacacactcagtacacacacacccaacacagacacacccagtgtgcacacacccagtccacacacactcagtgcacacacacccagcacaggcacacacacttagtatacacacagccagcacagacacacacaaccagtgcacacacacccagcacagacacacactcagtacacacccagtgcatgtacctgcatccagcacccatataggcacatatgtgcacatacccagcctcagtacaccacacacaccgacacacacacccacatcccatccttgcagggccggcaggtaggagctctggaatttggaaagtggaaagtgatttgttttgtctggtatggcttctccctctcgtgcacagagcgggtctccagggtgcctcacccaggggcctcacgcctatccgctctcccgcccaggcagccccctcctctcccactcctccagctcccaggaaggcagggtggcagtaaactgaatcacagccacgtggttagattgcagggctgaggcccgcattctcccaggtgtctgcatgtctgacccttcacgccgggatgaggggcatcggctcgggttttggttaaatcccgccttgcccctgctgtggaggacgccccctgtggtgcctggtgaaccttagtcttagagatcggttcatccccgcggtttcccaccgagagggtccaccagtgagacaggagggaagctccacctcgggtcggccgcctcacgcagcgcttccctcgtgctgccccatcattcactgacttcaggccacgaggacccgtatgttaaacaatcccgctcttctattttcttaggaaaccagcttgagtcagttatgaccggtgcaaaataaaatagaaaagagcccacctccctgatatggagggttttgccttttacacacaaagggcaaatcaatgtattttgcttaacgctgtttagtggcacccctggatcgtttctgttagcagaggtgttgacattctcgtggaacttctttctcaaagcacagccgtttcatttccaccaccctttctcagtacgctcagtcattttctttcaggacagactgaggtgtttgagagggactttgcttttggctcccgggttgttctggttctgtgaggtcctgcaggtgggggcaggagcccagctggggcctgaggacatgacaggcagcgtctcagcaaggccggggcacagactcgtaggcctccggttcagaacagccgtggtggcccagcctgtgcccgggtgtgcacacttcagagccctgcacagacgcctctgcaggattttgctttttaacattgtttgctccccaaactatcaaataatccagattcagaccctgaccttgggccgactcagcagtggcctctggtggaccggctcctgctgctcctccttggtcaccctgacctctggccactgtcccacccggctctaggggcacccagtgggctgagaccttcggcagctcaggctatgctgttgggcagagcgggtctccagggtgcctcacccagggctacgcaggaggcctttccagcagttccactgaggctctggacagggatgctacccacacaccaccctgggacgccaggggttttcgacacgacgatcggtcagaatctgcagtgttctcttcagtcaaaattgctcactgcgttcaaccaaaagctgaagttttaattcaacattgaaatgtcagtttcccaggtcaatgaagatgaaagctttttccttagaagggagcaaggaatgagcgaagcagagtcttgggaaatttcagaattagaataagcaccaaaaatacgtattgcaaagagcccagtgctgccagtttgatggctgttgtcaaacattttctcatcagacggcctcagctccacctgaatgtcagtcagtcccaaagccaggccatcgctcaggctaccacaaattctggaagggactgagtgtaatgagggtgttccagggagatgctccagggaaggaccccgagctccatccagggcagggggtgctccagggagatattccaggggcaggaccccgagctccgtccagggcagggggtgctcgagagagatattccaggggcaggaccctgagctccatcaagggcagggggtgctcgagggagatgttccagggaaggaccccgagctccgtccagggcagggggtgctcgagagagatattccaggggcaggaccctgagctccatccagggcagggggtgctcgagggagatgttccagggaaggaccccgagctccgtccagggcagggggtgctcgagagagatattccaggggcaggaccctgagctccgtccagggcagggggtgctcgagggagatattccaggggcaggaccgcgagctccatccagggcagggggtgctcgagggagatattccaggggcaggaccccgagctccatccagggcagggggtgcttgagggagatattccaggggcaggaccccaagctccatccagggcagggggtgctcgagggagatgttccaggggcaagaccctgagctccggccagggcagagggtgcttcagggagatgttccaggccaggaccccaagctccggccagggcagggctctgcccctcatgcatgcctaatagcaccccagggctgaggtcagggaagaggtttggttccccaggctcacacgcagtggggcactggtgatctgaggagggaaacggaggcactgttggcaaaaggaggtctgtaagctgagtgctctgaaatgttggccatgcccacctggacatgggccaggtctgaacgaggcagttgcccgagctgtggatgccctcacatgaagccctgggtaaggctgaaccctggacatttatccgaggcccctggaccgtgaagaagccctcaggctctgtccttgtgcagtgcgggggacctgtgtcctcaggactgggcacctcctcaaactaggccctcctctaggtgtggctctcaggggccaggcccgggatggccagtgtgaggagcagccctggacacagggtgccttcgggctgggttttggcctccttggggtgtcaccgtcaccacagcttgtgactttcgaagagcagcccagaatttgggctttaaattatatccctggatgtgtcttgttggcagctaattcaaatttgtttccagtgttgtcaaagaaaccctatgtgtgggttgcattcagccaggaggtcaacagtttacaacctcaatgttttaagctttttattctgaaatgattttaaagttacagaaaaaaaatgtcaagaatagtacagaatgcccctgtatgtctacagacatacagatcattcatccgtcttccctgatggtggtatttttaagtacaatgattgaaaccagtaaattgacactgatattaacgacagacgttttttgaatggtgtcagtttcctcacttgcagctttttttcagtcccggggtctcatctcggctggcacagagcgcttagttgtcacgtctcctaggcaactgcagtctgtacgggttcttagcttcccgttgtctcccatgactttgacacttcgcggcggccggccggtgctttgtggagcatccctggtcactgtccgatgcttcctcctgattaggccgatgctgtgcgtctttgacaagaacgccagggaagtgaaatggtcctttcttatcgcagcatcaggctgtgtgagtcggcctgtgggctaccaagcgagagacatttattttcttgttgttctaggggttggaaatccaagatcaaggtgtcggtaggtttggtttctcccaaggcctctctcctcggcttgcagacagtgtcttctccctatgtcctcacatggtcgtccctcgtgcgtgtctgtgtcctgatcttccattttttctttttttgagacagagtctctctctcttgcccaggctggagtgcagaggtgcagtcacggctcactgcagccctgatcgccgggctcaaaccatcctcctgcgtcagcctcctgagaatctgggacctcagacatgcatcacaatgccctgctcatttttcagttatttgtagagatgagatctcactatgttgcttaggctggtcttgaactcctgggctcaggcgattctgcctcagcctcccaaagtgctgggattacaggtatgagccaccgcgctcggccctgatctcttcttataaggatactggtcacgttggattagggcctactctaatgacctcattttatcttaatcaccccttcaaagaccctgactccaaacactgtcacattctgaggtcttgggggttagggcttcaacaggtgactttagtggggagcaattcggctccagcatagcaaatatgggatgtgaatgctcattgttgccggtaacgctcacgtggatggcatgagtgaggtggtgtctgccagatgaacccactgtaaagggatggttttcccctttgcctagaataaatatcttggtggtggggagataccgtgaaactacacaaccttccttcagctcatcttccttcatgaatttctacattttgattgctcttgcctgcaaaaattttgactgtaatgtttgcctaatgatgactttctatttccaccattccttctgcatttattaattggaattctgtgataagtacaaaccgtgatttatttattcagttgctggtgttgctatgactcaggggtactatttcatcccacagggcgctgtccggctctatcattacggattctgttgctcccgttgtcgcggccgtgaccgtcgggagctctgtccagttggtttctgcctcctttgatgcctccctcattttctgagtccctccttacattcaggcattaaagatatgctgggctcatggaatcggctctttccctaaggagccctggtgcctttggttggagaatggcgtttagaaagcaggattagggacaggcgtgctcatttctgctggagcgtcactgttctcagtcctctctcggtggacagagccgggaaatctgtgtgtgtgtgctctcagaagcacacgcatgcacctgcatcttcctgcatttttctgtgtgtctgtatgtgtgtctgtgttgcaaactaggattgcattctgatacctgtttctggtctaagactgtgggattcatttagcctttccttgtatgttcttctttctcccaaagtaggaaacctgtctctcattattctcaataattttatttgtataaatgtgctgcacacacaggttcagaattgctaacccacacccttgtgggaaacgtatgtcctgatgaggggacagtgtttgttcccaccctctctgcttttagccttacaccatgtagttaagataccatttctctgcgttccatagctggctcctttcttctgcctcccttcctgtagtgtcacttagaacacagtcaagttcatctgctgtcactggtactctcttctgggtcccccacaggttggttgattttcagtgttgatgtatttgaggggtatgtgaaccatcgtgtggttctgaaggcttcctccgagccacggcgcacccccgctctgtctccatcctccattccctgcaccctgttcccacccacttccccaggtaagccggtcccattcgtgtgtgtgtgtgttttgtatctcttttgtgccaaatgaacagatacatgtactttttaaatagccccttctgtctcctgtgaagggtggtataccatagaaactctttggtactcagtttatcctggaagtcactccaaacccatccgcagaggccttccagcttctcagctgcgcagagccccactgtgtgggtttactgaaccatcgccggcttattcagctcatctcctactcatgggcatttaagttgttacccatattttgtataaataacttgttgcagcaaatgaccctgtgaacctgcatattcctgcagtgggcggtccagcctctgttctggaaacccagaaagtttctatttacctgcagatggaccttcttcttccccttatgttgaccctcgggcagtgttgaggggcaatgaagtgacaaacagcagggagaaaatgaccagtctctgcaaatagacaactcagaatggtccccagctagccgccttctgctcctgaccctggtgtgtggatttaagtcatttctgaagattcaacctgatgagctgtcgaccacagatgaagacagaacggatctgagagatgaatgatgtatctggggttagcatctggatgatccgagtaatggttttgggagaggcaaagcctagaattagccacccctgagggacagtgctttcctgcccccggcagagcggcctggggggagttgtgcaggaagcaggtgcaggcagccccgctggccgggtcactggggttctctgtgacgtcagggtcagagaggcccacatggagggctggagcctggtgctggtgcctgatggctagctcctcagtgtgctggctttcctggcagaggggaggtcgagcgtggcttctagtggtccctaaagccaccagggtttccagtgtggctggtgctgcagcagacccaaccgagcatcctgtgtgttttggaaacatttcagtcatgttccggtcagtgatagattgcgtataccacagtggtcccatcagactgtaagaccagattttccctgtacctcatctatgttttgatgtatttcaatgcacagatccttcccattgtgttacagccgctggcagcattcagtacagtagtgggcacagtttgtagcctaggagcaataggctactccatacagccaggtgtgtggtggactgcgtcgtctagctttgtgtaagtcccctctgtgatgttcacagcacgatgaaatcgcctaatgatgcattttcacaatgtgtccttgtcattaagtgatgcaagactgtactccttttccttgaggcaccattcaggcctcccagacacgagaagggagcaatgggaagggagcaatgcagcaggcgtgtctgtgtgagaagctcgggcagggctctccgggccattttctcactggtcctgaggcctgctggctgtggcccgagggcagggacggcatggtggcctgggggaaccgtctctgcaggcacttctcacctcccggctccagtgaattacaggccctgtggggcttgatgccgtggatggaagttttgtagaaggccatgtttgtgtcttctgtgaagtatgaaaggtgccagtttgaaaaccagagaaaaagaaagcgtggattaaaatgcagtccccgttttaatggttggttactgcagttatttttaaaaaaagaaagtgtttgaataaggaatcctgtcttgaagagaggtggagaggaatttttatcataccgaaagaggatggtaattaaggcttgtcttagccaagcgttctctagggttttggggtttttcttttgaaggttgcttttatatttctgaggatgttgcgggggcctgctcttctaagttaaagtgatttgtctgatgggaagatttcccctggcggcactctgtcacgggccgtgaggaggaggtgaactcagaagagagtcacacatttgtcccccacatcgttgtcagggaaccgtgacatggaggctgcaggaattttctcccaacatgggctgaggtcttgaggcccgaggctgagatgccttcttttctttttttttttttttgatacagagtcttgctctgtcatccgggctggagtgcaatggcacgatctcggctcactgcaacttctacctcctgggttcaagcaattctcctgcctcagcctcctgagtagctgggattacgggcatgctccctgctaatttttgtaattttagtagtgacagggtttcaccgtgttgttcaggctggtctcgaactcctggcctcaagtgatccatccacctccgtctcccaaagtgctgggattacaggcgtgggccactgtgcctggcctgagataccttcttttgctggcacagaatggggtgcaagctccccagggtgtgagggacagagttgcaggcccatcctggaggctctgagggggcacctggtaaagcctgggggtgaggctgggcactccacatgccccagggctgcaccacggaagcccacggaggtcctgggacacgtgactgtgtcactgtgcccggttcatgtcaattgcgccagtgccatcagtgtgtctgggccctcaggctgcagagggcaagtgggaatggtcagtgaggtgtcatctgtgcttctcccctgctggggagcctgcactctacagacaaacggggcagccgcgggtgtggctgggccatggactgtgtctcagtggactgtgtctcagggcacagaccctgcttccagcctttcccggtgccctccagagggctgggtggcctcattactcctgcccttctgagctggatggaatcccttattctcccaaagggctcattttaatgtctgcgggggggcgggagtcctttgccactgacgtcagccctttgccactgacgtcagcaatcgtctgtccgatctctcagggcattggaagggagtgagctccagagcacttcctgaccgcgtggagccgagctccggagcgctttctgaccgtgtggagctccagcgtccatgtcaccccggaacagaggaggttcccaggcatagagtggaatccagactttggccttttgaagttggcttgtgtttctggggcttaatcttccaagggaactggttctgctgtgttgagatgcattggtgttggggcactgtggctgtggggctggcctgggcattgcagggagggtgtggagcagcatccctggcctctacccacttgatgccagcagcccctccccaggtttgacaactagatacgtctctaggcatcgccaatatacccgggagactcccaggtgagagtctcccaggggatattgcagtgttcacggctggatgctactcgtcactattccatattccattatatgaataggccaccgctgactcgtccttgtaaccataatttggctgtttccagttgcggactattacacacagtcactttcctgtgcttctcagattcagaaccatatttgagggagatgaaagcaggcgggtggcttctcttggaggcaggtactttctcgtagggattgtggcacacagctgttatttctctaggatttgctgtgaatgagggaaaaacggttgattgtgaatgaagcaaggttcattttcttcccatggtcattccttggtgcactgtagatccaggatattcctactctgcaggctgtttaaataacacacacacacgcacacacatgcacacacacatagccaaacatcgtttgaaatcccatccctcagagatgaccagtgtcaacattgtggtgacttctttcggggcttctctaggtgtgtgtgtgtgtgcacacaattttatataaatggggttctgctatccgtgccgtttcgcagcttcagtttttaaatttaccatgtctatatttccgtgccagtagctcagactgtatcatcattctcacggctgcttaatagtctacgtttgtcatcctgctggtgtgcgtctggcttcgggtttgcattctcacaatgctgtaatgaatcttctgtgttcttgctgggttatctctgtaggatgaattctcagaggtagaattgctctgttaaatgtctacacatttttttctcattttaaaatttattttggatgtttaatccagatctgtgtttatttactgaggggagcaggtagaattgtagagtcacagagaaacaaattagagctaggggttcagggttactcagaccaaacttctcatcaccctgcatccccctgccagccatgttttaaaagcaaacgtgttattggagtataacatgcctgcagaaaagcacgtatatgtgtgtatggtatgacagtttttacaaagcgaacatacccaagaaatcacccctcaggtcaagaagcagcacacggccagcaccatggaatgccttttccagacgccagcagaacagagctgccggatgttctagtgagcgcgtttctgctggtgaacctgactgtgcccttctttgtgggatctgcccaggatggcgtcgctgggtcgaggggcatgttcagcatgaacagctggtgcccggtgccttctccagagcgggcactggttcactctccccttggcagagcgtgagaagcccagtgtccagcattgggtgtggcccgtcttttccaggtccgccattctggtggctaatgttgtctcattctgttttttatttgcttttcttgaatgatgttggtgacctttttatgtttattggatatcaatatccttttaaaaaaatctactcaagacttctgctcatttttctgttgtgctgtttgcttttctttcttactgattttttaaggagtttttgtgtattttgagtatgagtcatttgtttgatatacgtattgcaaatatctcttacacggggtcttcccttttgacttcgatggtgtctgctggtggacagcagttttcaacgtcagtgcagtccggtttatcaagctcttctgtattcagtgcttttatgtcttggtggaggaatcctgcctaacccgaggccatgaaagtagtttcctgtgttacctggaacatttgttgttttcactttcgtgtttgggcctgtggtccttctctgcttgtttctgtgtctgcagtgcagtaggggttgagactgaccactgtccccagacggatatgtaatttacccagctccacgtgtgggaagaccaacctctcccctagtgctgtggtgccgcctttgccgtcagtcacgggaggggcgacgtggctgtttctggactctgctctgtccgtcatcccatttgcatgccggtacgattgcaactgccacgtcctatgccaaggcctgagaccggctcgtgtaaaccctccagcttgttattccaggcggcctcggctatttttggtgagacgcatttaaaaatttgatgcgcgtcgtgaaactgcccttcagaaaggtcgtaaccatttatccagccatgggtggggctcggcagtgccgcctctcccacgccattgcagactctgatgcacaggaagtcacacctggttgtcattcatagctgcgtagctttggttattggtgaggcttcctaagtgaactggccatctgcatttttctttatgttgtaaccaccttctttcctgatttctccagtggagtgtttgttttgttagtgacttctgagagctctcgatgtagttccaacgttaactcattgcctgctgctgtaatctaccaggcttatttttatattgactattatagtcagtgcggatgaacacttgaacctgcagtgcgaatccgttcccctgaccccagcctctgtgcctccccctcctctgctcctgcctccctctgtcaagatccttgggatcacactggatacatgtggctaatccaggatcacctcccacctccagacgtttaatttacccacatcagaaaggtcccttttgccatgtaaagtgacattcccaggctctggggttaggttgtgggactctcgtacggtgacattcccaggctctgggattaggttgtggacccctcgttcggtgacattcccaggctctggggttaggttgtggacccctcatgtggtgacattcccaggctctggggttaggttgtggacccgtcgtaggtgacattcccaggctctggggttaggttatggacccctcgtatggtgacattcccaggctctgggattaggttgtggacccctcgttcggtgacattcccaggctctggggttaggttgtggaccccttgttcggtgacattcccaggctctggggttaggttgtggacccctcttaacggtgacattcccaggctctgggattaggttgcggacccctcgttcggtgacattcccaggctctgggattaggttgtggacccctcgttcggtgacattcccaggctctggggttaggttgtggacccctcgttcagtgacattcccaggctctggggttaggttgtggacccctcttatggtaacattcccaggctctggggttaggatgtggacccctcttatggtgacatttccaggctctggggttaggttgtggacccgtcgtaggtgacattcccaggctctggggttaggttgtggacccttcatacggtgacattcccaggctctggggttaggttgtggacccgtcgtatggtgacattcccaggctctggggttaggttgtggacccgtcgtaggtgacattcccaggctctggggttaggttgtggacccgtcgtaggtgacattcccaggctctggggttaggttgtggacccctctggtggagggtggggattgtgttttgtcagctgcagagggtaaattaagaatctgtggggagcccttccagactgtgccgctgaaattgttggggcagtggctctatctccgagaatgcagctagatctcagaatgcatccccaacgttgcagcgtgcgcaggcccttcctcctgagggcacccaccttggtgaatgggattttctgtatccagttgtctctgctccagttgatgtggcagacacagggtcagacagaagcttgctggacatcgtccctcccctgaggccaaggccggacgaggggtctcttcagctgcacatcggggcaggtgaggggtgtcagccacgtcccggggaatagtagcctgcccacctcagcagaatggcgaactcgctttcccgtggcctttggcatctgtagcgtggatgccatggagtgtggcgcgtgacacctcaatgtggcacactgagactgtaaagaacagaagacaccagtactttaacccgcggctgagggctcatcgctttgaatacgccggggtgtgcagagcacaggtcagctattgtgtaggagagacactgagccgcatctgcagcctgttgttctggggtcgccttggttacagccacctctgtcacaatgtgcagtgtgtcggagtctccttccagaggagcactcgcccacagccagggcccccaccgagggccgctcttttcaccagggtttctgaacaggccacatgggagcccggaacgcaggaagggcaacacctcatcccaactcaccacactgggccccggggagccaggggctgggcggtctcaactctgagctccactgccggaagctctgctgccttggggggtcctgtcgaagctgctccctgcctcccaccctcccttcctgcgccatgtcatttgttgggggctctgacagcggagcccactcacgtctggggcagccttgggtactgcgtgctgccctggtgcggctcaaacactggacggtggccttcatccctttaggcctggcttagcctcttgcaggtctgagcccaggtgcaggagaattcggggagactgtggggcatgactggaatggggtgagttctgacctgttgctgggatgaccatttacacagcttgagacataaatgcagtccctcacccatgcggttctgtcgacgagtcacccattgctcacagcttctcagatttgcgtttgtcggtggttttcccaaggttccaggattagcaaacacggcccccccacccttccttcaggcctggtcttaaaccaggtcacccacctgcccctccccttgaggctgcaggagttctggggcccctctccaccatcccattgtactggacccccagggccacctccatggatctctgtgtctttgattcttgtgcccccagggttgggcctgggtgtcaacaccttgtctccccaaaacctcaggaagtgacttggcttctccccaggggccagctctgcataccaaacatccgggtcacttctgccaacactcggaaaccctgagaggtgtcattgcctcgtccccgcacatgccaggtgcctacctgccttccctgtgggaagctggggagccatttgtgtctgtttggtgaactgctgccccggaagggaggccttcagatgaaccagcctgacttctctcctatcgcagcctccacccttggctctggggttcctgccgctgtgccccacagatagagggggtgacattgctttccaaaatgcagcccttagccctgagacacagcccaaatgtccttctccaagtgtcaggcaccagctccaaccctgtcccccgcaaggggcacacagggctcccccaggctctactgaagccctctcctaggctacacaggcattcagtaggcggcagacgttccctctccaccctggcggtggaggcagagctcacaaaacagctctattcaaagacagtctcacaggtccacagcttattgtgccactcgcgaccccgcctagatcctccacgagcacgaatcatctcacgggttctgacgcctgctttgaaaattcagcgtagtaggaggtttcacaactcactttggtaccctggaagtacatgcgatgcctccgctgacacgtcccccaccgctgtgtggccttttccccgagtgttcttgctgcaggcccgggtgccagcacctgcacacgaactctcggctgccctcttaggacagcagtgagcggagagggctctgcagctccacgtggttgctcactgtgcttcctccagggcccctctgcttcctctccctatggtggggcagtgacgattatgcttattagagaaatcaccaccccgtcacagagatgacatttattagagaaatcgccaccccatcacagagatgacgtttattagagaaatcgccaccccgtcacagaggtgacgcttattagagaaatcgccaccccgtcacagaggtgacgcttattagagaaatcgccaccccgtcacagaggtgacgcttattagagaaatcgccaccccgtcacagaggtgacgcttattagagaaatcgccaccccgtcacagaggtgacgcttattagagaaatcgccaccccgtcacagaggtgacgcttattagagaaatcgccaccccgtcacagaggtgacgcttattagagaaatcgccaccccgtcacagagaccacttcatttgcagcttcctctcctcccgagctaaatggcgcgcgacgagccccgccctgccctccaggacattcatggctcgtgccaggcagtgccctgggtctcctgcatgcccaccctccgtgtgcagaccaggctggccctgcccgagctctttttttgtgcgggcagggccgttgggtgggtcccctgtagctgtgtccagatgggattgtcttgtttttgtgtggcaggggctggggtggggtgggaaggaaggacttccaggccggaggggtttctagagctggtcattgctggggccagggtgcccttccatcatgcaccccacaagcactgcccaagcaccacatctgtgctcagcaccgtcagagccctggaggcacagtgagcaggacaggcgtccacatgcggccttccttcccgctcagagcgtggcatgcagggttgggttccttatgtcttttcggagccccctgaacgcagggaattcttgtcctctgctgggctgggttgcgcaggtgtgcagtgacggaggcagccaggcaggttctcagtgaagacgggagtgtgtgtccctcttgccttggctgacaggcctgggtcccggtggagtggactggagccggccctggaggggcaggccgtgggcctgggtggccacaggggcttgcaggggcacgggatgtggtggttgccaggtccctggagcaggtgcccaaccagggctgcacagccgtgtgtcctctgtggtcatttccacggctgctgcgtctgctagggggaagcagcttccctgagccgcgtgggtgaaggctggggacacgtggtatctgcaggatctaggtgtgagcgtctgtgcattttcacggcactcctggcaggacagagctccaccctctgccagtcctccccgggggatgccggctccacctgcagctcacgtccgatttccaccggtacccatcgtcaccatcaccagccttgcccctggtttcactgtctaccccggaggccagcgccagcctcccagccgcccccagctgcacacagcagccagagtaatattcgacgtggccgtcaggtggtgtcaccctgtgctcgaaccctctcggggcttcctctgcatttcaagtaagatctacacgcccttcttcccctgcccaccctgccgcactctgggccactccccgcccattccactccgctcccgccatgcgtctgccttgctctgcgccacatcaagtgcattcccaccccagggcctttgcacgcctgtccttttgaatggaatgctcttcccccgggtccccgcatggttgacaccttcccagagtcgccactgccgacctgactgtcctccactgcccagcccagcctcgccagccactcgccacatcagctggctccttttctttcctggaaggcggcactgtcttacttgtgtgtttgcttattctttcttctttgtctccttcactagaaagtaaactccatggggtggaggaaggaagggagggaggcagagagagggacagagagagagaagagcaggagagagagggagttggggaagagagaggctgtcatgtttattgctatttcctgagtctagaacagaacctggcatatgacagggtctccataaacatgtttgttgaatgactgaggctaggacacggtggtggcccctcgctgggcagggtgggcttgccatgtgtcccccagctctggagaaggtggctctacctgaggctctctccttcaccaacctggtcacgtcaccttggaaatgtcactgcaccggctcccgctccttagcctccacctgaacacagggccgctcttgcctggggcctgcaggacctcctcactggtgccccacgcctacagctgctcctccgcccccttcagccctcccctccacagcaggacgagtgccttttaaagaagcaaatctggtcactccctcctctgctgtggagtcttctgggcccctgtcactcagagtgaagacagaccctgacctgtgactcacagccctgtgtggtcagcccagcctcatcttgaacctctctcctcctctgtccgtgccctcacctccgggcctttgtacacgctgtcccctctgcccagagcactctcctcctccccttcctggtcgctcctggtcgtcgtcctgtctcagctctgctgcctctcctggggccctttcccagcgctcctggaccgggtgggctcaccgcgctgtgtcctgtccctgtggctgtagagtgcacaattgcctctcccagcaggtggtgtgcgccatgcgttgtgcttgtcctgacgtgcacggcgtgtgccacacagtagggccctttgccaacaaggaagctgagcttagaagcagcatgagctgctccgggtgacacagctgggcagtcacgccccgaggggcccggagttctgactgcaagtgcgacttcagtagcgtctgttttctacgtagaataaattgagactgcagtctgcaccttcagaccgcctctgcattttatgcctcaagaaggaaatccactgagccgagacacagcttctctgtgcttaactgatgatggggtgttagcagctgcccccacacatgatgtctggttgtctgtttgaaaatagaaacagggcagcagtcaatcactgacatagtatgatgttgttattatttatcgaagaaactgtattataacaatgttaataggagccaaatcaaaaggagaaaaatggatccattttcctagatatagacctgttatgccttatgcacacagacatgaacgttttataagtggaaattataatgtagataaaaatgttattctcctagttaattattttcactatatctataaaaggcaagatgattgcttggagattgattcacacccaagccaaaaccgagtcacattataccactactaaggttctcctggtctcctttttgtttacctgctttaaaaacaacaaagcttatttgggtttaaaaataaaaagaaattaactttggtgaggctgctcctgttcctggcccctttatatcaggcccctggagaggcatggggacagcagggttcagccttgcagcgagtcttactcactggagggggttgtactcactggagggggtctcattcacgggaggcggggtcttaaccactgcaccgggtcttactgcatcaggccttactcactgcagtgagtctcactcactgcactgggtctcactcactgcactgggcctcactcactgcaccgggtcttactgcactaggtctcactcactgccccaggccttactcactgcatggggcctcactcactgcactgggtcttactcactgcaccagggtcttattgcatcaggtcttactgctccaggtctcactcactgccccaggccttactcactgcatggggcctcactcactacaccaggtctcactcactgcaccgggcctcactcactgcaccaggcctcacttgctacactgggcctcactcactgcatggggcctcactcactacaccaggtctcactcactgcaccgggcctcactcaccgcaccaggcctcactcactgcacggggcctcactcactgcacggggcctcactcagtacaccgggcctcactcactgcaccgggcctcactcaccgcaccgggcctcactcactgcatggggcctcactcactgcaccgggcctcactcactgcaccgggcctcactcacggcactgggtctcactcactgccccgggtctcactcactgccccaggccttactgcatggggcctcactcactacaccaggtttcactcactgcactgggtcttactcactgcactgagcctcactcactacaccaggtctcagtcactgcactgggtctcactcacagcaacagaatcttactcactgcatggagcctcactcactgcaccgggtctcactcactgcaccaggatcttactcactgcatggggcctcactcactgcaccgggtctcactcactgcaccgggtctcactcactgcactgggcctcactcacggcaccgggcctcactcactgcaccgggcctcactcacggcaccgggcctcactcactgtcccaggccttactgcatggggcctcactcactacaccaggtctcactcactgcactgggtctcactcactgcactgagcctcactcactacaccaggtctcagtcactgcactgggtctcactcactgcaccaggatcttactcactgcatggggcctcactcactgcaccgggcctcactcactgcactgggtcttactcactgcactggggtctcactcactacaccaggtctcagtcactgcactgggtctcactgcaccaggatcttactcactgcatggggcctcactcactgcaccgggcctcactcactgcactgggtcttactcattgcactgggtctcactcactacaccaggtctcagtcactgcactgggtctcactcactgcaccaggatcttactgcatggggccgcactcactgcaccgggtctcactcactgcaccaggatcttactcactgcatggggcctcactcactgcaccgggtctcactcactgcactgggtcttactcattgcactgggtctcactcactacaccaggtctcagtcactgcactgggtctcactcactgcaccaggatcttactgcatggggccgcactcactgcaccgggtctcactcactgcaccaggatcttactcactgcatggggcctcactcactgcaccgggtctcactcactgcaccaggatcttactcaccgcactgagcctcactcaccacaccgggtctcactgcaccaggatcttactcactgcatggggcctcactcactgcaccgggccccactcactgcactgggtcttactcactgcactggggtctcactcactgcatggagcctcactcactacaccaggcctcactcactgcaccgggtctcactcactacaccagttctcactgcactgggtcttactcactacactgggtctcactcactgcatcatttgggggtttggcccctttctgctgatttttgctctaactgttgagacgtgtggggaccatcaccaggcccctgtggaggggttcagatgacccagcagtctggaagccctggacttcccccatccacatagcccagtgtctccacagtgccgggagggcctgtgcgctgagccagggcaggtggcagatggcgcagggcagccatgtgttagaattcctctcaaccttcaaacctgcatctcgcctgcctgccacctccgggttgttaggcatccactctggtttggtatcgcagagccgacactcctcccacaagggaacgagccctgcttattcccacccaggcccatccagctgagagcatctttcttctctgtgactggggccagacaacagaggggccgatactacagtcggggggcagacatggcaagtggaaatgcccctggggctcagccactggagtggcccacagtgtggggtaggtggacactcatcagcacgggctgtttcctcatggctggaggcagaggtgatggaggggcaacctgcctctgactctgccacgagagcacagccggggtgcaggtgagggggacggcagtgacaggtaggctgacctttgacatcagggtcagaagcaaacctgatgtgatgggtcccctagacccgtcctgtcccccaacctgctgattttcccagaagaactgtttgcctgaaacttctgatttttaaataattgcaaaacataaaagggaaaagactaggtcgcaggccgacacctggggcagatggagcagggtggttacggcctcgagtggaggagggagcaaggctgtccccctagggaggaggaagcctatggtcatctccccagagcctctccaggccaagctcagagggaactgcctgcgggagaggccaggaaactgctgagtctagtcctctgtcgaaggccccgagctgtgtgcggagcaggaacgcatggagcctgtgctcctccaggccactgcccgctgagccgggacggtgcggagagtcctgtgctcctccagccactgcccactgagccgggacggtgcggagagccctgtgctcctccagccactgcccgctgagccgggacggtgcggagagccctgtgctcctggcccctgcaggctccagctcagcccccagtcccaccaggaccctcacggggtgaccctttcaacgccggggaaatgggggaaaagccagctcagcctgagaggagggtttccataaaaatagatttcccggtctagaccatcttcggtcattattcagaaagttgtgaaaaagtcacacagagttcacgatggccgtgcctgagatggaaagattgttcaaagacaaatgagtcctgttccctgcagggagctctgacaagggacagctctgaacatctggtcctggaggctggctgtgtggactctgagggggtcacttgtttgttgaaggctttcctctctgagtgctttgccgtttcaaacatggggcgcacccacccgaacccaaccctggggcgccttggctggggtggcactccctggaggagggtggctggtccacgcccctgccgctaagcccaggctcacgctgggaaagggcccagactcagctgggcccaaacagggctttctgctttaaaataatgaattacttgcagacatttcaaagctgggagatgccacataaaaacctggagttctatgttcccttggcaaatagaggatctgagaaggtgctgccggccagctgtgctggtggccctgccggcggtccctgaggccggcgcagataggatcattctgtccctgttttatgaacaaaacagacaccaagggccacagagggacctggctgctctgtttccagagccccaccccaccagcggcaccctcaggcatgaccttcccggcccctgtaggagcctgagtttgagacccatgaactggctcctgctcccaggggccgctttattgtatctctgatgctttttcccaggagtctggaggagatgaatggggtttgtcattaacaggacagggatttgaggtgttttgtcaaccagacgtgcaactggtgcggagaagtcagtggcttcctcctctccctcctgctcttcatcctccccttcttctccttattcagaaggagctgacattctcttattaaaaagaacacagggtgaatcatggttttgatgtgtggttacatatgtttatacattaaagtaaatgtatattatttcttaagggcaaagtcttaagcagtaatctccataaaatcatgtgtttggtacacccttttaaaaatgcattatatacttaactattaaacaaaatactcacacgcttctcatacttgcagggacctaggatcgtcctgtgagcaccaccgtgggcagcctgccccttgagccagggcagggaactaatagaggcctgggccgggcagctcagaaacagccccaggtgcacacctaggtgaactgtgattttggggtaaaccacccgccctccagagctgccttgttatctgtaagacagggatagaacaaccttgtgtgtgccagcctcaggggctgctggctgccagatcgcatgcgacagtcatttgggaaacggcaggcttgctcgctcttggaccggagcctgccgggcagtggtctttgcaccactcagcctgcaggtgacccaaacactgtttcagtttcaagacagtggccaatatttacatcagacgattcttaccttagcatcagaattgctagcttcttcctgaaacctgaacttctcgcggtgcaggtctgacctgctgtgtggcaggacagtggggctgaatggtggcccccccggagtttgccatcatccccacctggatggtccctggggacatctgagttgtgacctgtggtgatgatgccaccatttctctgatgccctcacttgtcctggggtgaatgtttcgatgctcttaccaggaaagggtagcagggacttcactgagcacagaaaatcgggggtcttggtgctggccactggcgcagagaatgtggggaggcacccagaaggatcctccagggcctggttcttggatgatcttgtggagccggagggtgtgggtgggggatgtgggtgcaaaggagctgcagaggataccagccctggaaggaggaagttgtctggggagaagaagagcaggtgtggacagggcagaggtccgccctttccctgtccagtggaaagcctcgatggggagctgacccagccacctgaagcggcttttgcctcccaccccacccttgagggtataactagtgaccttggcagggagaccgagaccgagaccactttgtgacctccgcagggagacggagactgtggtggccaggacagcatgtattcagaatcaaagaaacaggaaagcaaacatccagttatagctggagaggaaggtgtgcagcttaatgaggctctgcagagacccaggggcttggccatccactcagggacaccaggtgccagagtggacatgtcatgcatgaatcagggagcagttcccggggaacacactgcacgctgttgccgcagcctccccctgcctggcgcctctgcctgcacccgcctgggaagcacattctccctcttctggggtctttgcccacgtcacattccctccccacggtcctcctttcctgggttatttttctagatgccactgctgacattgacatgacctagggttcctttgcagtcgggtttgttatccgagtccccctgcgaggagaaggcgccgatgacctagggttccttcgcagtcgggtttgttatccgagtccccgaggagaaggcaccatgtgtccttggacattttattatcggctgcgccccaggcccctgcacggggcagttgcccagcaggtgaggaaagggggccactgcgccccagctgccacttgcccacagggatatttttttacagaactgatgatccagatttttttggtaaagttatgaactgtcccaatttttaaaatgttagcaagtgattcaaaacagcttaagtgctgaacaggccaaacccagcccttccatggggccacatcctggacctcccagagcccttggttggcatcatcccgacaagcctcccactccccagtgagcctcaggttccggagcctgcccagcgctacccccagccccctgagccgcgttcttgctgccccgacactgatgagccaagaggaatgttccagaaacagcctcatggtacacagtaaatatttgttgaatgaatgaatgaagtagacataagaaattacatgtgagttaaagaaaatccagcagacaccgctcctgacttcatgtctatacgtcctccacttgaaaaccttgaggactcgtcactctcccagctcagatgtttggtttctaaaggaaactcccaccaggtagcagccttgctgctggcttctcccagctccgtgttcggtcccggtggggtcacaggcgctgcggctctgtctgtcgcagcccaggtgagccaggagggggacgccgacctccaaccccggcatggcgtctgcaacacaaaggctgttcctcctgagcgtgtgggagcagcattcgagccagagtttgaaattgatggctttaggccagcagaataatttgatttagctggcaacagttacgaattggttgatttcacatgaaatctgcactagggcctgcgggcacagctgggcgcattccccagtggtaactgtcggattgtccgcagctgagtgtctgcccatgcgaggctgcggccctccccgccctgcggccctgccaacctgtgccctcctgggcagggcccagcctggcccctgtgggcaggtgagttgttgcccctgctttcagctgggagcctgcaggcctcaagtacatcaacccaaagctgagcaaagagcaaagtgcagggtggggttgggagcgagacaggccagggtcctgtgcaccctggagcagcccggcccggggctgagcatgccgtgcattttctcagatggcctcctgtccgggttcattgcttcctcccacagctctggtgaagagctggggagaggccttactacctttctgcagatgaggaaactgagacttgtggaggtcctgtgagtccagacctgccactaagcactggaaacgggagtaggaaccgcatctttgggcccctggactgacaggggtgaaaaccatccctttgggtgcataccagctctgggctcctccagcagccacgctcactgccctggcaaaacatgacttggctgtgggcgtgtggaacgcacggctttgtccttgcagacaccatgcaggcctctcccctgcaggctgcgtgtgggcaggaggctggctctccttctctacaccctttggtgagggaggcagtgctgcctgagggccatggggtgcccagcactggacagaggaagacgccaaagctcgggtcccgggatggagggccctgcgcacgcacacagggccacacggggatgcacgtggggcagagtgcacccgcagggctggggaacgggctcgtgcggctggggagcaggctcgtagtgaccggagggcatagtgactggagggcggggcgccctggttccctcgggaggatgtgagtggcttcttggataattctgcaggtgggtgggactgaaacccaccaccctgggatgagtgggaagtgcacctgttccccatgaggaggggggtcttttggggaccttattctgaggagcagagttgggagggaagcatttggccgggccactagaggttccctggttctaccaggcgtcaagacagcagggaagactgggtgttaacttcaggcctcacaccgtgtaggaactccatcaacaagaaatagaggttctaattgggtttccatagagtgaactgaatctctacacacctctgtggggacttagaacaggttctgataaagcatcgctttctcactggcagctgtgaagtcctagctatgtgggaagtggtgttaggaccatttaatgatcgctgagtcttgttagaaggatgaagcggccgtcctcacatgggtgcccttgtgtcctgtgtgcacaaaagcatcggggccgaggaggccacgctgtgtctgcagagctgggtccgcgcgtgttgctgtccggctcccaggaacccgtccacccacgagttccccccttgacaggagaggcagaagcacagggggctgaggggaccggtcctgggtggggtcacaagagactcgcagctcctggtctcagaggactggctctgcaccctttttcttttaaaagtggccctctgaaaatatttatttgtaattctgtaaacataattacatctccattaagaacctgaaacattccaaatgctggcagtgtccttttcaccacgattcccaggcctggtttatcttcccctcccctgagaaccccgctgccctccctcccacggctgtccttccagatttcccctcgtgtttagatttgcacccattggaaagctctgggtgtgcgagtttctttttacacacacacgacggcatcacgctgccagtgtggttctgagccgcagcggcgctctgggagacttccttccagcacacagagctacttcattaaaggacaaaaatgaaaccgaaacccgaagagcacgcccgcctcgcgccgtattccaccgcgtggctgcgccgcggttcgtgtggctggtccctgcggggccgctctgttaccgatgttcaggcttcgccctcttgttcctcgtgcgtggtgctcgggagcgccttctccgcaggccgtggtgcgcgtgccggtgggtttctgcggcgtgtgccacgcagtggtgttgcagcgccaggagcggatccgaatgcgaatggctgctgtccagggggcctccaggcaggcacacgcctcccacaccacccgcgggcgcattgggcatgccgaaatccgggagagcgtggatgagcctggccctcgtcccccagtccccagggcagcccgcaggacctgtgggtctccaggtcgcggccgtcatgtgggctgagccctccgtccagcactgcttcatgtggacgccgtaggcgggacagtgttcgggaggcagggatctcgtcttctcccgaaacctggtgccatcatgttggtctctgggcatcagccccaggcagggagggcgacaggaggatcctgaaactctgttcacaaggggctccaggaggagaagagcggggcagcctctgtcagcgcacgcccgggagctgcggcagggcagtgctgtacagggacccccccccacccccgcctccctgcccgggcacatccggcccacaggccagcctcgctcagcacacggctgtacctggatcacgcccatgcccaccgggttccttcttacaacagctgagagggatgtggggatttacagttggggaaactgaggctcagggaagtcaccatgctgcccaaatccacagcggagttgggattagagttgagtctcattccgaagatcatgctttctccttgggggacaaagcaccacagctgccggcaccaggcggccagcgagggagctgccctgcggtcctcagggcgggcacaggctgagatgtgaccaaggtgatagcgcccgtcctggtcagtgctccctgccttgtccatatccttcctggtcagtgctccctgccttgtccatatccttcctggtggtgctcccgccctggttggtgctccctccctggtcagtgtcctccctggggagtgctccctccttgctcagtgtcctccctggtgagtgtcctccctggtcagtgtcctccctggtcagcacttctcccaggtcagtgtccttcccggtcagcgtcctccctggtcaatgctccctcccaggtcagtgtcctccctggtcagtgctccctctctgctcggtgtcctccctggtcagtgtccttcctggtcaatgctccctccctggtcagtgctccctccctggtcagtgtcctccctggtcagtgctcctccctggtcagtgtcctcctggtcagtgctccctccctggtcaatgctccctccctggtcagtgctccctccctggtcagtgtcctccctggtcagtgctccctccctggtcagtgtcctccctggtcagtgctcctccctggtcagtgtcctccctggtcagggtcctccctggtcagcgctccctccctggtcagtgtcctctctccctggtcagtgtcctccctggtcagcgctccctccctggtcagtgtcctccctggtcagtgccccctccctggtcaatgctccctccctgatcagtgccccctccctggccagtgtcctccctggtgagtgctccctccctggtcagtgtcctccctggtcagtgccccctccctgggcagtgtcctccctggtcagtgctccctccctggtcagtgtcctccctggtcagtgccccctccctgggcagtgtcctccctggtgagtgctccctccctggtcagtgccccctccctgggcagtgtcctccctggtcagtgctccctccctggtcagtgtcctccctggtcagtgtcctccctgggcagtgtcctccctggtgagtgctccctccctggtcagtgtcctccctggtcagtgtcctccctggtcagtgctccctccctggtcaatgctccctccctggccagtgtcctccctggtgagtgctccctccctggtcagtgtcctccctggtcaatgctccctccctggtcagcgctccctccctggtcagtgtcctccctggtgagtgctccctctctagtcagtgtcctccctggtcagtgtcctccctcgtcaatgctcctccctggtcagtgctccctccctggtcactgctccctctttagtcagtggcctccctggtcagtgtcccccctaatcagtgttcctttcctggtcagtgtcttccctggtttgtctctaaggcagggaggacggagcccattgagggcaggggcgagtcctgtgaagatctccagccctgggtgtggccagtctctgtccttgtgtgctggcctggaggaggggagtcaggtgatccacggcgaggagacattgtggtttggagactgctccggtgtcctccgcacctggagcctggacaatggggggacagctctgaagggcagatgggtgggagcattccaggagcaggcagccccgggcccccttttgcaccccttccgcagccatccagggagccccctgtcgggaggagaggggcagatacagagtcaggtcagcagcctggtgagaggagccatagaggcagtgacataatgtgcaatgtgaggacagttgcaccgccctgtgagctcacgtggggacacttcctctgccgggctggggctgggactctcctccatggctgtgaccgttccagacaagagttagccagccattgtcagtgccagggacgtcacgactgtgcgtggctctgggggttgggtgaagccataaattccccacctcagcatttcttggaagacgtgggtcagtgggaggaggcttggctcagcgtaaagacatcatcaccaacagccacccccaaagaatgacagccctgctgatggcctgcttctccctcaagtaagggtctgagatgaacatctgatacttgcagaaccaggccctgtggacctggcccccactttcagccccttctcctccaagcccaggatggggctctgccagtcatctccacatcccatgtcacaggggtgagatgggggtggcagaggcagagtgtcggctcccctgaagggggttgggggcttcacatgtgctcttgacctctcaccagctggacttgctggtggtcaaaggcccttcaaccctgaaacagggagagcagatgcttgtcggtcacagagctctctctggccctgccccagcactggggcttatgcacacagtgtgctgagtggaaggctgagggcgcagggtcagccggggccagcagtgcttctgacactgtgaatccagcagcggacggcacggtgggtgggcagccccgcaccatctgtgagtctcgcactccccagggagcacgtttcctttcacacatcctgcagctggccaggagtgcacctatgtctgtcgtggagagctggaagcagccgcccatcctcgggtgtcttcctgcacccccgctgctacagctgtggggcggcccagatgtgcagaggggcctgcccatctttcccgggtttgagcccacagcctacgggaagcgctgagatgggtgtgtgcatgtggggcgtggccaccgagggagtctctggtgatccggggctccatggatttgcggggcggacggcccagccaggcaccctcccagctgacgtgcagatcagtaatttcttccacaatgataataggttgtcgatccagtagctttttatagttcacagaaatactcttgtgttctgagaaaccagtcttcatttgtgggcagggcagggataattttcagatgctggcgtggccctcctgtgcaccacggggctacacccacattccaggagccaggtccctcctgaagggctgggcggcagggcctgctgtctcccctctccgagactgtgcagggaaagggcctccagctggtggggaagaagcctgcttagcttcctgacactcagggcaagaggaggggtctgagaaggaagaaagaaaggaagcacaaggagaatgggttttaagggatgggagagagagagagagggtgagaatgggttttaagggatgggagagagggcgaggccaaaggccgaggaagggagtttggaaaagcggatgatacttcatatgctgtacgtcacgagcactctggagctggaccctcaggctcaggtgcctgctcctttgtggattagctgtgtgactgtgaccgagtccctggggtctctggtctcagcttcctgccttatcaggcggggccttggatactgtctgagcccagggctggcacaagggctgcatgccgcacatatggtgggacctggccttggggggcaggttgtgagccctgcgctgtcaggcatggccctgatacccgtcctctgctcctctcactcccgccccacctgtgtgcctcctgcacactcatgccccatgcacttcctccactcgatgtggagaaacgtcttttcgatctccatgcctacttttccctcactctaagccattatagccagagattctggacacagagtgttgactatgtcacttcctaatatgccttagaatgcacatgtcactgaaataaagtgctcatccgtgcaccacccagagtgaccttgtagatcagcagtgacctcatgacttgtctcctggcgagcactggttaatgggattgccggcctccctggctgccccacaggatcataaccatgtgctttcaagtgtgtgctgccgtctggggtgcgagcaggggcggccgtgtaggctgcagagtgagggcaggtttggggccgggcagtggggctgcctttaggaatggctttcctggagcgggggagagcatgggcccagccgtccagcaggaccagctgtgcctgtgagtggggtccgtgggggactcggagccactcccagtcaaggtctctggctggagagggcgtcgggggagacacagcaggaaaagatgggaaccgagcatctaaaacctggacaagcaggacagttgtttgtggcttgcagatgtcaccctggtggtccaggaagagtcctctgcctgggcttggccctctacctgggaaactgggcacgaatgcttctcttgcatagtgcttggcacatagattggatacacgggggtccaggaatgcgtgcaggaagctgggaattcagtgtgtcctcctgggccagcacaaacctcatcgcctcttggtggcctgttacataacacattttcctgtctcaagttgaaatcaccatcgtcatcgtcatcatcatcatcatcatcaatgagattctcagtcaggacatccggtgctattcatagccaggaagtgctgttagttgggcaggccaagtactctggagttgctggaactaaaatttgacttgtgtttttctagcccaaatttcccaagatcacgagccactcgtgtgttgccctgtgtgttagtctgttcattgctataagaaatacctgaggctgggtaatttattttaaaaaaagaggtttaattgcctcacggttctgcagggggaacaggaagcatggtgctgacctctgctcagcttctgggaaggcctccgggagctacagtcatggcagaaggtggagggaaccaggcacgtcttacatgggcagatcaagagaggtggggggtgccacacacttttaagcgaccagatccacgagaacgcatgatcgtggggacagtgccaagagggatggtgttaagccagcggtccccagacattttggcaccagggactggtttcgtggaagacaatttttgcacggatggggtgggggatggattcgggatgaaactgttccccctcagatcatcaggcactagactctcatgaggagcttgaaacctagatacctcacaagcagagttcacggtcggtttgcattcctatgagaatcaaacgcccggctgatctgataggaggggagctcaggtgggaatgcctgcttgcccaccgctctgtgtgctgtgtgcccggttcctaacaggccacgggctggtcccggttcacggcccgggtgttgggaacccctgtgttaaaccattcatgagaacaccgcccgcatgatccagtcacctcccagcaggccccgcctgcaacactggggattatagttcaacatgagatttggtggggacacagatctgaaccacgtcctgcctcagacgggcactgtcctgcccagctgggggaggaagatgcacaaagtctcgcccatgtcccggggtgctcgtgcttgtgggaagttcaggattatgctgccccaggaacgattccttgtttcttttgattgacatcaacaatagccaatggcctgcttcattttccttcttttctgctgtttgatttgaaacagaacttgggtgtttgtattcaaatggtaattttccatcaaaattcctgtttaaacaaattgggaatctcaggaacaacatataatgttctggaggagaagatccttgagagagcagtggatatctgttttctttctttctttcttttcttttttttttttttggagccaaagtctcactctgttgcccaggctggagggcagtggcgatatcttggctcactgcaacctccatctcccaggttcaagctattctcgtccttcagcctcctgagtagctgggattacaggtgcccgccaccacgccaggcgaatttttttgcatatttagtagaggcggggttttaccatgttgaccaggctggtctcaaactcctgacctcaggcagtccacctgccttggcctcccaaagtgctgggatttcaggtgtgagctaccgcgcccaggcgatagctgttttcctaacactttcttagcatttctctaccagtaggcaattatttaaagaaggagaaaacattctgtttccagagtggtggagaattgaattgaattgaattgaatatgaattgaaacatacatatggagaggatcaagtttgcttcaaaggatgtttccaaactcgcatctccctgctctgtgtttcttaattaaatggcttatgttgagatctcctcctcctgcttcagaaatcacatctttcataaccctgcatggtgagctctgatctgaaaacttccagctcctcctggggcctgcacgggaccctcctttattaccccaagaaggttgtcctggagagaagggcttgcaggagccgagctaaggggaggctgctgctgctccacaaattggaaaagctctgcctgggaacactgggctgtgcgagccactcccggggctcattttctctgagatgagaacccctgcaccgagtcccaccctggtcagggccgtgtcctgaggctggcgtgggtgggcacctgctggcttcctgctgtttcactccgaccttgtgcccacatcaccatcacttctcgtcttctcacctgttcccgaactcagtccccaaagcgagctcttcttctatagctggaacattcagggcaagagctctgttcttcctgagggctcttgcttcacattcactgaggaattaaaaggtgcttccagggctctcctggaggtctgcaaccaggcatctgcctccgccagggctggcacggtctgctttattcaggagcagtcgggggggcataaaatgcacggattggcttagacctagggaatggggagtggtctttgtgggggaggaatgagaggctcactagagtgaaattaaattagggttaaatggacagaagtgtgagtagcttctgagtagccaaaacaacccacctctaggactccatttcttcctgttggcctcatggcattgactccaagaggatgctgtggtttcatgagcccctgaggagccgtaggtagctctggaggggtgaggaccctggagagggcaggtgggagcatctgccactagacctgctgaaggccagccagtcccacatctctgcttgtggagaacacgacactgtctgccaggtgcattcaagagctgggtcccaaggcacctcagccccagtttatagcacagaatatgtccatggctgtttttctgcctgatccagaaaacatgagctccctctgccatacagtggggccaaatgatcctttctgcacaggcctgggcctttctcggtcagatcggggcactgggacctcccaagtcactcctggtggcatgctggtttctaaagcataatttacagtccttctggtagctctttctctgacagtgcccacagagtcactgtgatgacggagtgcaggctggtgatggcctgggccctctgctgtctgcttccacttccctgccccgttcctgtgctgtgaacatttgcaccctgctttcttcacgtgcatgtgctgtggcatgttgtcaatgttttattttcttggaaacccgtcttcattcgatcaaggctgcttaattctgctgaagtgctctgctaaatcaggaaaatgtgtatcttttaagtaaagggttttctgtagaagcaaacatagtgatttagagaggacctgacatgatttttgtggcctgagaatgacaggtgatcatttcagaagtaatcggccatcaccccacagtaaccccataaacagggctgtttttaagaattttagactttccataacatcagtcaaagtcaatgaaccagaatggtgctaatcaacatggataaatctcaagaaagtaaacccaaagacaaacatccaaagtgggagggcggtagtgtgctgcgacaaccccaccactgactcagccgttactctactgatggttattcatgtcgtttacttagggggtgtgcttgggaatggggtcacatggtgagaaacacttcagttttgctgatttttgccaaatttctgtccagagcagcaccgatagcccaccagtgtagtagacgtaaagtcttgccaccctcactggtgtgaaacaggatctcactgaagatgtaatttgcatttccctgattacctgtgagtgtgagcatctctcacctggttatagcccgtcccatttactgtctccctcccagtttctgcttcccctcaccttgggttttaacccctcaccacaagaacccaaacctgtatcagagtccccaggcctagagctgcttcacctgcacagttacaaacaataaaaaaaacaaaaacacacttactgaggtgtaactggcaaaaaaataaatgcacatgtgtaaagtgttcaaagcatttacccataaaaccatcaccatggtgaagacgatgaacgtgtgtgtcaccccgaaagttccctgggtcccctttgtaatccctgtcccctccctgttccttcccacctccctcccctgtcccaaggcaaccgctaatacttgttctttcgccatagattaatctgcattttctagaacttttgtatgatggaattgtatagtatgtactcttttctggcctggcgttttccactcagcattattgttttgctaagccattagtgtcaagctaagtccagttttgcttactggactagcgagccaagacccttctgtgcgctccacccagtgccctagaagttccaaggtttccaggccggcaggtgtggactcaggctattcctggccctgtgtgagctccagttcggttccctgtaatccattgggtggttctttccctgttctgggcgcttccttcctgcatgtgccagtctctgctgcgctgagaactcgaggggccctccactccatgcagctctctcctctccggtcactggtcttggatatctgagcaccagggtctctgccgggtcttgcctaggttcccctcgctgctgcagcgtctgggaactgtctcaaggctgagctccggggcagttatagagctcgcttctgcgctgtttcctgtccctcatgcacccctccccttcattgcctgatggatgtccagtgctgtgaaaggcacaaattcacaaactcaccttaggtttcagttggtgccaacgggcggtgagtccggtcttgttacactgtcttgggcacaagtctcgactgagcttgttactttatgtttctatcctgtttctggtgcatggaaattttatttaagttttgaacttggccatatctttttagtttggaaagttagattttaagaaatacgcttaatttgtggagggaaaaattatggaagattttgaaatagaccaaaaagattgctgaatgcgtttcatgggaagtgggtgttatctgggttacctgattctcgggagtctgtgctccctaccatgtccctgagccacctcacaaccctgtgagtgacagggtgcccacggattcacgtgatccttggccattgacatgtaggtctcgtctggttgattcagttgattcttctccctggacatcaagttctgccagttttgtgtctattaagcacactgacttcagcgttcgggatgggctcatgtacatatggttctttgaatttccctttgaagtgacggtcacatctcacaggttcccttgcccattaacacgttaaataatatctttgatgtgtgttcattttatctctgtatgagagtcacgatttaccttgttaaaagttatcctttaatatgtgggggagaatttcaaggggaaggctttctatgttgttgacttcagagttcttgtgcgtttgtgtgctccaggcctgggaaaacctggtttaaactgtttcatttgtgaacttacaaagtagcatagcaaacaagggaaactgtgagacaaagcagacgaacagaaatatgaacgagcacagactctggggacagccacagagcttcacagagcatatctctccttagacggttctagaagcaaactgtgggctgtcagattcccccattcttttctaagtaaaaccactcatctttcatggaaaataacatcatttttgatgtggcatatcagagggctcaagaccacaaacatgaccggttattattaacagccacagagctaggctgtaaaatagatcagaattttacaaactttgaaacccacaccattattttcacaggagtgaggattacacccctgggagctcctgatatggtcccctgggggcaaacctatgatggaaattttcccatcatctgaaatcttctaccctgaaggaatatattgagagtcctgttttgtagattgtgttatgaaaatattatttttttcctcttggttgaggatcactgatatgcatagaggcagtgttaacttgttctgatcgtaaacgctttttcagacacacattagaggttgtactttagtttacaatccaggaggaaagtttgccggctataggggaaaatcccaagttgcggcattggaaacaggaaccagtgagaatgatcaatgcaaggaccactgcccattcttttgatctttataaagaatgttctcctaaagctcaggtctagccacactggggccctgactctgtcaaaattcggggacaagaggccaaggtggagggttcctctgggaaacatggagcccatcattgctgaggctgtattttaagctaggcttctcttttcttcctctgatactgtgctatatcacagcaccgataacattaacatgaagttgtggagaacttggcaaaattctaaccaagtgtctggagaaaaataatttataacatgaatattccatgagcaagaggcatctgagaagaaaaatagtctggaaagagacctagaggcagagccagcacctttgatgtgggtggaccatggaacctgacacagggcggaagaccccgtggggataatcacttcccctggttctagcgtggaccacacaagagatccttgtgttggaaagagaaaacaaagcacacgcttctggatgcaagcaggtgttaatacagcttccagggccctaggacgacgaaggaagccatgtccctggggagaactgaagacacccatgtcccaggagccagttgtggaggcgttgattgtgccgtgggtcttggactcacgtgtgttgacattcgacaaatagatgagatttaggatgctgggaaggagggggaggataattactaattatggtagcattgtccacaatgattagagtaacgggataaaatttagagagatgattttgtggcaacgacttgggtgtaatttttgaagtggaggaaattgttgcaggaaataatcacaggctacccccgctgtgataaacaggtttgaagaactgcacggaacgctgcctggcgagcgcctgctggtgtttgagagaagctctgtgcttcacccctgaagctgggttggatggcatcagtggttcctaatgtgttgagacacgccgcggaccagagaatgcttggaaggggaacggtggagaaaaggggccagatggcagcggagccgagtctgcgctgctgtggccgtttcctagggccaccgtgacaaatggctagtggctttaaacagcagaaagccgttctcctgcagctcttgagtccacgagtctgagacaaaggcgttggcagagctagttcgttctggaggctcagcgggaacgtccacccctgcctgtctcctagtagtcctggcctgcggcagccaactccagtctctgccccgtctccccacggcctcctcttccgtgtgtcattgtcctttcccgcagtgtacgaggacactcagatgggactgagggctcgtccccatctagcacagtctcatcttcaacgttacattaatgacatctgcaaggaccccatttccaaatagggtcacattctgagggttctggggagacatgaattttgtggggaaaccgttcaacccacaacacaggtggagctgggatgaggcagaaaatgggtctgcatgtctctgccttcactggtacctccctagtcaaggaccccatgtgctttcctgcaggactgaccgcagccgtcttcgtgctcatctcgcttctttcttgttcatgtttttccttgtctatgcaccagggagaatgagcttctgttattttaacctttgtaactttattgggaaataagtattaagagaagcagacagcaacttcctagatccagaagtttagagcaagaggggtttcagaggttactcttttgtgcttttcatttctgacaatatttttttcatggattctggccttgccctccccatgagactagaagttctttgatggcagagtctgggttttttatttcatagcatccctccagagggctcagattccagatcctacagaacacattttcagtagctgtgtctgttgcttgctggattctagggaagcgtcgtgagcgtcctgggtcagtggagctcctcaagaggatgtgacccagggcgggtcggctgcttggcctaacagaaacctccatgccctttcagtgatctgtttggaatgtgctgggtttgagttgctgagcaaggtaccaccgtacacatttgcaggctgggaccatatttttattttccactgatctttcttcatacctgatgtttcaagattccttcttttatcatttcctttccatttccagaaatgtactttagacattttttatgtccggcctgttggcatcaaattctctgttttcctttgagaacgttcttgtttcttcttcatccctcaagggtattttcgctggacatagaactcagggtgcacagttcatttcctccagctcttgagagaggccgctcccttccatcctcagcagtttctgatgggaaatccacgctattctaattgtctggccttgtaggtgagatgtcctttctctctccctgctttcaacaatttgttttctttgtctttggttttcagaagtctgactataatgtgtctggcagtgatttgttcaggttttccggtttgagtttgctcagctgcttgaatctgtgtgtttatatgttttgccaaatttaagaaattttggccattggactgtttttccaaccccactccctttctcttctctttatggggctgcagtgacacggatattatatctttcgttgttgtcccacgggtcctcaaggctctgttaattgtttaaaatctattttatctctgttgttctgattgggtaatttatgttgtttttcttcaaattatccttctgtccactactctttcctctgtcctctctatttttatttttgctgttgagccatccattgaggtgttttgttttctttttttgagacagagtctcactccgtcacccaggctggagtatagtgacgccatcctggctcactgcagccagccccccaggttcaagtgattctcgtgcctcagcctcctgagtagctgggactacaggtgtgctaatagacaccatgcccagctaatttttttgtatttttagtagagatggggtttcaccatgttggccaggctggtcttgaactcttgaccttaagtgatctgcccccctcggcctcccaaattgctgggattacagacgttagccaccacgcccagcccatccattgagattttgatttcagttattctatttttcacttctaaattttccatttggttttcctttatacaggttgaggatccctaatctgaaaatctgaaatctgaaatgcttcaaaactccaaatctgctgagcgctgacatgacgctcaaaggaactgctcactggagcactttagattttggattttcagcttaggcatgctcagccgggtacatataatgcagaaatgtcaaaatctgaaaaagtccaaaattggaagcacttctaattctttgctgagactctttttcatttgtttcaagagtgtctgtaactatggaagcatttttatgatggctgttttaaaaatccttgtcagttaatttcactgtctgcatcatttggtgttgatgtctgttgtttttcttttctcattcaagttgagatttttccggttctcggtatgacaaatgattttcagttgcatcctggacactttggttattatgttatgacactctggatcttatttaaatctgttttagcagtccttctctgatacccaccactgggaagggccatgtgccgcagtactgcggcgtgggggtgaaagtccgagtgcctgctctgtgtcccttggagtcctggtgagggctgggtgccgcatggctactgggttcccccagggctctgctgatgccccgcattgcttctccccatggcttcacactcggtcttctccagtgccacctccctggggatgctcggggcatccgccacagccctgatacccactcagcctttgctcatagaggctgggtggggccacactttctcccgtggtatttggagtagctaattactgcctgtctaggtggcccctttcctggtcctctgtggttactggacatatcagatcaaatagctcaggaggcaaataatccacgcaggcagcgacagcaggggtcatgttcaaaagacccagcagcatggacaatgctgtgtcagagcgatgctggctgttaactgctggctgggtcacaccatgcagagactggccaagtcagtcctgggtgacagaggccgtggccaagggggccttacggacaccagcagcctctccaggggcatcagcagccgtaccactaaaccagaggagttggattctgattcttactctttgtccaacaacatcagagtcagttacccctgcctgtgacacctgatggttctgtgtcttccatcttccctcacgtatcagtagctacccctggattcttttgatcaaaaactttgggatgcggaatgtaaaatcacttatgatctcactgcctggagatcccattgcctggattctcaggcaacccttcttctccttgacccttgggccaagctcatgggctgtggtaattctggcctcccaggggctcagtccaccccgcccatgttacctggatggagaacagagtggacagagtcctgaaggtccctcctcctggggtgcattttacgtaacactgttcagacctggacacccgtgagactcatccctgtgaatgagctcaggatcatgcagggcgtcatattctccctcccccagcccccactgcaggcctcagaacaaatcctgcaggtcagcggtataagtataatgaggcttataacatcaggacctgcagtcaggagccccgcccagcctctcaaggtgatgcctatggcccccaaaagtccctgtgttcccacccccagtgactcaggctgggagtatgccttgaaggcaggggaggagggaccacaacccatctgacctggcttcgtgagaacgttagtcatgggtcctcttgggatcagtagccagctgtcacctgccgtccccgtcacaggcttaccactgacttccctgttcctgtgcagaactcagcaaatcaaaatgagacgtaaatattcaagcctctggcttaatagtaggatcctcttctcgcctgcccacgcttgtgtttcccccagctagaaatcttgactcatttatagttgatctgatgttgatttaactgtttttttaaacttctattttggaataatgatagattcacaggaagttgcaaaaataattacaaagaagtcctgtgcacccttcatccagtttcccccagtgattacaaatgagagaaatacagcgcaatgtcaaaccaggaaactaacatcagtgctatgtatgtatatagttctgttagtttaacacaggtgtaaattcatggaatcaccactgaaatgaagatacaggccgttttaccagccagcagatctcctcgttgctatcctgccttccttctaccatccctaactcctggcaaccagtgttctgttctctgtatttatgattttgtcattatgacagtggtctgtaaatagaatcatacagtaagtgaccttttgagatggactttgccactcagcataatgcccatggttgtataggtcagttgtttatactttttcattgcttagtgtggtatttcatggaatggaggaaccacagtttgatttttttgtttgtttgttttttgttttttttttttgagatggagtctcactctgtggcccaggctggagtgaggtggtgcaatttcagctcactgcaacctccgcctcccagattcaagcgattctcctgcctcagcctcccaagcccggctcatttttgtatttttggtagagacggggtttcactgttggccaggctggtcttgaactcctgaccttgtgatccgcttgccttggcctcccaaagtgctgggattataggcgtgagccaccgcgcctgaccaaaccacaatttgtttgaccatttgcccactgaaggatgttttggttgtttccagcttctgactattactaataaagctgctgtgaacaattgtggacggcattttgtgtggacataagtttacgtttctgtgagacaaatgcccaggagtactattacagggctgatatggtttgactgtgtcctcacccaaatctcaccttgaactaatccccacatatcaaagggggggccagatggtgataattaaatcacgggagcactttcccccatactgttctcatggtagtgaatacgtctcttgagatctgatggttttataaaggggagttgccctgcgaaagctctctcttacctgccgccatgtaagaccggactttgctcctcattaggtcaccctagccatgtggaactgtgagtccattaaacctctttcctttataaattatgcagtctcggatatgtctttattagcaaggtgaaaatgaactaatacaagggtcacgtggtaaatatatttaatattaaaaaaaaatcttccaaactattttccagagtgtctgtacctttttacatttccatgagcaatgtatgagtgatttagtttctttgacagcatttggtatagttactattttttattttagttgttctcatcatggtcttaatttgaattttcccaatgatgagtgatgttgaaaattttttcttgtgcttacttgtcatctggatattctcgtcaataaaatgtctcttagtatcttttgcccattttctaattggattctttttgtgttttatcattgaattttaagaattctttctattttatagatatgaattacagatagaatctatagatattatagatagatatgagttatggatctggattattatagatatgaatcctgtgtcagctacatggtttgtaaatattttctccttgtctgcagcttatctttttatccttttaacaagagtttttcacaaagctgaagcttctaaattttgtaaagtccaatttattgattttctaattctgtggatcatatttttggtgtcatcactaagaacttttcatcaaactcttggtcccaaagattttctcctttgtttttatctaaaagtgttatggttttattttttacatttaatctatggtccattttgaattaatttttttgtatgaggtgctgtttcagcactatttgttgagggggaaaaaaactctccttccttcattgaattgctgttgtttctttgccaaaaatcagttggctgtacttgtgtggggctgttcccaggttctcggctctgtctcattgatctaattgcctgtccctgtgccagtcccacacagtcttgattactgtagctgtgtagtaggtcttgaaatcaggtagagtgaaatcagcttgagcacatgattcatatcacgttattcttcttttacgaaattgttttagcttttctagttcctttgcctttaaagatgaactttagagtaagattttctgtgtctacaaaaattcttgctgggatgactaggaattacattaagactgtatattaattttgggagaatttatatctttattgtgttgagtcttccaatccattaacatggcgtatctctccatttatttaaaatcttctttggttttcttcatctgtattttgtagtttttggcatacaggtcctatgcatgttttgttaaatttacacctaaatgtacattttttgagtgactatgaactcacttaataattgtaggagtttctttctggattccttgaaattattgacataaatgctcataccatctgcagatagggacagtttcacttcttccttttgatctgtgtgctttttcttcctttctgtgctggctggaatcctcagtactatttgaacaacagtaatgagaccagacatctttgcttattccctgtcttaggaagaaaccattctgtcttcgactaataagttagctctaggttttttataggtgtccgttatttgaggaagtttccctttattcttagttttttgagagtcctaatcatgaacagatattggattttgttggtttttctgcctcgatatgatcatgtgatttttcttctttagcctgataatatggtgaattacactaattttcaagtattgagtcagccttgtattccacagcattccaattgaagactggggctatatttatatagtgcattttctttctaaatcttcattctgtgtattaggagaatactatcatcttttgcttcatgggccatgtgaatatatgggcacataatttatgaaacactgtaaggaaaagtgttggcacttggtctctttaaggagcacattttctaaatggaggaaatgactcaattgaggatcccatatcttctatagaaaagaccctttcgctactcaagtgagtttatcttaattcagagaaaccttaatgttttccccactctcatatgttgttttagaaagcaaagggaaaggagagttttctttgggaatcagtgaatcctcaagtgctgagatgctccttttgggtacactggtctgggtgagcgttcctgcctagatgcatagatgtgtaaattaattccatcaaactgcccagctcttgagctagtgagccagacctactgaacaggatgagcagcactaggcaggctgttatctcagccctcattcatcagattctccctctcctctctctttgtatgtatttaccttctactcccttctccactctcagaagtccttttcgaataaatctttccttggtccttgtagaagccacgtggccatcccattccccacactgatgccataaacatctgctctgcaaatcttaaatggtgccgggggttcagggttgatttttttctgtaccaggtgagtggctcagtagaggtgagagaaaacggagtgacagggtggcttgggaagcgattgaccagagtgaaaacacacctgttggtgttgctcctgccaggtttgatttctgaacaagagtgaaccttgtctgaaaagcaaaccatcatgagaacgctcgggccctgctgtagcagcgtggaccctcggctctgtctgctggagccgctgaccaaggctggtatgcagtgccaggaccccactccctctggagacagaaccggagtcacccctgtcccgtgggaggaggcgtcagagacaggcccttgcctgtcactgtctgtgtttcctgatacggatctgtcctgggttgggcagcttcccttgtacggatctcaggcgagaggcacccaggctctgggtcccttttgagaccaggctggagtctgtgatgggagggagggggtcagagtgcagggaaggcccctgccagaggccaggtgtgtttaaaggtgtgattcctcggttgttagttgtgcgcatgaaggagagggggtatttttatcagtagatgagggagaggtttgcctctctcttccccacataaggtaggataaaagttgttgtgacttgcttaccacagactctgaatttctgctcctggctggaagcccccatctcccaggttagggccctctccgggggtggaggaagagacctggctcagccctggtctttgggcctctcaggaacgctggggaccttttgagctgcccagtccctgtggagtttctggggacacctgatgtctctgtggtgaactctggcaggggtgaggctgaggttaaaccttagagccccagggccgggccaggggcccttagtccatttgagccaaactggaagcaaatttgtggggcaactccagactcatgagcaggcagtaaagaaataaaccctgactccagcagtcataggagccacaataggattgtgaccgctacaagatttgaatatttttagaaaacaataatcctggccgctcatcctctgccacggggagggcggaggatgtgatctcacgtctgcaagcaccgcaggctttggttccctagggtttcccgccgacgcatctgcacctgctgctcactccgaggggtgactccatcaggatgtttagggctcgggtggcctgtcagcaccttccaggctgtggggcggtggccctgtccgttcactcccagcagggatgcctggctgggccattgtcctcggccccctgtaccctccctaccgcaggccaccttgtgtgggttcatcccaccgaagttcacggagtgcccctgcatgcctgcccccgttcaggctgtgagggagaggacagagccagacagaccgaatcctgccctgtgactctcacatcccagtgctggggacctggggaggtgacaagcaggcagacagacaggcagtgacaggtacatgcaagatcagatcccaaggagcagcacgtgggaggcctgctggcaggaggctgccctgaggagtggccacgtggatggggggatcgtggggcatcgggggagaggcatcacacacctggctggcggcgggggcacaccttcaagtctgaggagcggccaggaggccgaggggctggaggaggcaggtcaggggctacgggcagatctttccgggcccgggggcaactttaagggcctcggctttcccctgagtaaggtgggtgcccccggagggtctgagcagagggacgaagcgatggacttgggctttcacaaaccctgtacagggcagggtgagcaggtagacggggctgccgccaggctcaggataggagtggaggatgttagcttcaggtctgctatggggggcttgctgacagggtcaaggatttgggggctcaaaaagttgaaggacagagtggccactaactgacaagggcatgactctgggacagtccagggctgggagtgaggtcaggagggaggtttggacatgctccgtttgggaggcctgtggacgcccaggtggggaagctgcattggtggtggtagagctggagctagaatggaggacggagatgcagattttgcagttgtctagctgggcacgttgccaccccgagcaaaaaactgcttctgttagtgagaaagaactggagaaagaatactggtcaggcgtcatcagggtcagcccaggccctggaggaggtgtgcctggctctgtcaggcctctctgggcctcctccagacctggcttctgagcaggggctgccctctgcctcctatatgtctgatcgctgtgcccctgatccttcttctgagcaggggctgccctctgcctcctatatgtctgatcgctgtgcccctgatccttcttctgcctcctatatgtctgatcgctgtgcccctgatccttcttctgagcaggggctgccctctgcctcctatatgtctgatcgctgtgcccctgatccttcttctgagcaggggctgccctctgcctcctgtatttctgatcgctgtgcccctgatccttcttctgagcaggggctgccctctaccttctgtatgtctgatcgctgtgcccctgatccttcttctgagcaggggctgccctctgcctcctgtatgtctgatcgctgtgcccctgatccttcttctgagcaggggctgccctctgcctcctgtatgtctgatcgctgtgcccctgatccttcttctgagcaggggctgccctctgcctcctgtatgtctgatcgctgtgcccctgatccttcttctgagcaggggctgccctctgcctcctgtatgtctgatcgctgtgcccctgatccttctggagggagatttcagagaagtcccaccaagctctaaagacctcagccactttcctgaggccaccagatcggtcaccatggggaccaggggctggttccagaaccccatggaaacttggaatcccggacaggcagaggtctggggccgagtggggctgagtggctgcacacctcagcctgctctgttctggaaacccgtgttgctgggtttgatgatgcacgcttgtgtctcatgggtggcgctggaatggtcaactctgggcatttgggtttttttctctgcctctggcccaacattagacagaccagaatctcagatattctactaggaatgaaagaatgttcatcttccccaccagacagaggggcggggagggaaggcgtggagtgggatgagcttggccactccaggccttggtaccatgatgacttttccaacgtgaggagggtccaggtggctgaggctgtttgactccgcactgattttgacatgattccacatacaggcctctatgaacccctgactattctcatgcgaaaaaccacagcatatctgcttctcctgaaagtttaaagacactctggcattagcaatgctttccccttgtttctgtaagtcatccaaaattcttcttgggtagaggccagctataacaaaataaataaaaggataatgaatggattggatcttttgatggaaaccatttggccaacttcatgacaagaagaacaaagggaagaaaaaaagaaacaacctttaaattctagctgagatttcaagtagccatggcccaggagccaaattgaaaagctgtaacacttttatagacgtttataggtattgcttttctggactgactgcagcactgagattaggcagtagtgcccttcggcaggtaaacgtgttcattccgagcacagcagctatatggattttctgttctgcctctttctttactcctgaaagatgccattagatggaatttggatgctctggggccatggccttccatgttctgggaggctcgtggattcctgtggatcgtccccccgaccctgaggctcctggagctgacagagcccagcaggcccatcctccatctctgacgtcacaggcatctgagggcagggccatgcactacgagtccatgatgtaccaggcgggggagccagtggctattctaggaaaattccatctccagggcatgaaaagacagataaagatcagtgtaactcacctgtgctgagtaacatggtgggtcacggtggggctctggaaccaggatgtcttgacctgagtcctgaattggccccttcccagctccgtcacttgccgtgagtcctccaaccaccatgtggcttcgtggcttcatttgtaaagtggggcaagagtgtgcgcagctggcaagggctgagcaattgaatgacttcactcatgtaaaacagagcaggaccaggcgcagggcaggtccgtggaaaaggttaactattgccatcattaggaaccatcaaggggctcacacacatgatctcagtggaggcttctagcagcctgtgagggggtgttagagatgtctggatgccagcaacagacgctgactctggttctcctgagcagaaaggtagtttattggaaggataaggggagcacaatgtatcagagtgaagtcatgaaaacaagacaaaatccaaggtcttagaaaatatcttatatggtattattatatcatttttgtattcggcacaaaaagggcaggccaaaaataagccctaatgagacaactgtataaaaacgttttgagtagcctaatgagtgaaaattatttaaaacgtgttaattattattgcatgtatgaaagaatacaggtcgccttgttgcgatagaaatgccaaagtcccttgctttccaataacatgggcctgagaaaattcagtgtcactcatccacgacgatccgatgtggaggttcctattcccacggagatgaagccacaagcaaaggcctgtccgtgtgcaggtctgtcctgagcatgaacatcctgtcccagagagaaaatgctccctctgggaagagcctccctgggcaccccttgggtccttggagcccttctgggccacatctctgcttagcgttgggggacctgtcacacccgagtggggtgaccacgggctcgcgacctgtatgaggcgagactccagcattctaggggatgaccgcaaaaccaggccctcagcagaggccgcctccttccagagccttctgtggctgggcgggggtctccaggcagctccgcagcccccgcaaataccccctggtgctgagtccgcttatacagacagagacgaagggcagcgacagcgtttttgttttctgaagtgggagggtctcgtgaccgcagctcaggaggaaaacgaggcgccggctttgcaggtgggtaggagtttgtgttgtactcggaggctgggagcccctggggcttctgtagggagaggcggtctgagacgcgctttagaagttgacctgctgctctgcggggactcggtgcgggagacgagtggaggctgctgcgtcatccaggtgagaggagagccaggtgcgcagtgagcagaggtgggaggaaagctggttgccacggagatgagggcgtgtccatcactgcaaggctccacccacagcactatcctgggcggaaccttcctggccccacccacagccttagctgattggactgtggagtacatgtgacttcaggctgtgtccttataggttggctggcctctagtgccctgcccatgtggtcatggagtgtctgcacgggacgtcctggagagtcgggtgagtctgccatccaggatggtggagaagagtcctggggtcagagtgggcctgagaaggggctgtgggctgcaccatcaggggaatgtaagagaggctggagccacttgatagagggtggggccatgtacaaggaggtggggctaagtgaaaggaggtggagccatgtgcaaggaggtggggctaagtgaaaggaggtggagccatgtacaaggaggtggggctaagtgaaaggaggtggagccatgtgcaaggaggtggggctaagtgaaaggaggtagagccatgtgcaaggagggtggggctaagcgaaaggaggtggagccatgtgcaaggaggtggggctaagcgaaaggaggtggagccatgtacaaggaggtggggctaagtgaaaggaggtggagccatgtgcaaggaggtggggctaagtgaaaggaggtggagccatgtacaaggaggtggggctaagtgaaaggaggtggagccatgtgcaaggaaggtggggctaagtgagtggggcgaggccactgggagaagaggagccatgtgagtgggaaggtgtcatgtgagtgggaagggtaatgtgagtggggtggagttaagggggcggggtccctgtggttaattctctggtttgtctctggagattcttcctcctggctcccaggacactcaggacctctttcccaaggatggaacctctccacacataccatggccacagtgcaggtgaccccagtgctgctgggccacagagggcaacttgtgcacgcactggcgggtcctatgtgtccaggaggcccgaggaaggagagagtggagacccggatgccgggttcaaggctcaccagggatgcgggcaccagggtgctccctccccagcctctggctgacagcactgaactcagccgcctcgcccggcttctggtggcttctggtccacgctgtaccctcctctgtgggctccgtctctgcagggttctcggagacatcgcagctgctaaatgccaaatgcagaacctgggctgtgggtcccggcctggcttcgtgtgccgcgctttccactgagagccgcgtgactgggtgctacctggggcgagggggtgatgtgaaaacactttctgttcagtttcggggcaagctgccctaactccagatccccacgcaattcagagtactttcttttctttgggttttgaaacagcaatgcagtttcctctctgcatgcctctccggcttgcaggctggcacctgtgcacaaaccgagcgtgagaatcaggtgtctgcgggcccctttcttctcaaacgggactcctgaggtttcgcagaggagacagggacttggggaccttggagggagggacacagtttagagtccagttcacactggatggtgggtctcttaccagaccagcatcccaccttgacgatgaacagacagcaaactgaagcttcttggtctttggcaaaaaccatgtttcctggggtcttctgaagtagggggcatcggtgggtctctctgaccctggtgcgtcccaggtggccatgggctgtgcttgtctgcacaagtctacccctctgcctggtgtttcttggctgtgctcagttgcctttgaagagggaagcagtaggttgtgaggttggggaggctgctctctaggattgagatctggccccatgatctcaaaataaggacgtgcacatgtcagcaccatgtgtgtggggggtggcgcctgcattctgtggtcaggacttattccattgaaaggacagaccccttcaagctgccttaatgccaaagagatctctgcaggctcatgggcctgggaggcctggagagggaagacttgggggtgtcatgttccagggcctctgctgttgtcctcagatggattgatcacatgttggaagaaggatgcctctggtttctgaagcagcctgggctgagtgggatgtcctaagggtctgagcagcatctgtgggtatccttggcgccccaaggcactgctcacctctgcccaggagccagcactggggagagtgacttaaccagacaggcccacatgcagatggcactagtggggtgaaggcagagtagtaaatccccaccatgtgcccctgctctactgggccatctgtcccagggtctcacctggcctaacctttccttctcagcactggggtggcccagctcatcaacctgtcctgaaatgcctcattcagggtcctgcccacctcccacctttttcttcctgtgctggaaccaggttctgaaagtcctgtcttagcctctatcaggctgtggctgcctcatccatgctggactgtcttatgactctttgaaagcaagaaacctcagaaagcaccaagagatagaggctggttcaaggtttttccttgtcgtatctctcccattacttctgttatccttgatttccctaaaggtgggacatttcaagcattcaaagccctgaaccctgtttagttgtgagatgggctggagaagagggtggcacagagggctgccccagatgttccactgagatccacctgcacctgacccactgctctggggtcagtatttcggctccttatattgctttacttaccatcaaatttaaggaccatggtgccatctctcttttgcttgggacaatgttggacacgtagctccccaaattatttacaggtaaaactgtacacctagtccattttctgttgttataatagaatatctgagactgggtaatttataaaggaaagaagtttattttggctcgcagttctggaggctgtgaagtccaagctcgggcagccgtgtctggtgaacaccttgtgctgcttcacctcttggtggaaaagggaaaggaaagccagtgtgagtgaaagagactgcaagagcgagtcgagcttgctttttgtatcaacctaatttcatgagaacaaattcactcctgcaagaactaacttactcccataacagtgacattaatccattcctgagggctcagccctcatgacccagttgccacttaaaggccccatctcccaacactgctgcgttgggaattaaggttccaacacatgagcttttgggggacacagtcaaaccctagcaatacttacataaaagccagcacatttctaaacaaggggcattaacaggctatcatgagtatcaaatttttttcttctctctgcatgtatctcctagaaggagacactttggtgtaccttgctcatgaacagtaggcaataaacaagcagttggttaatcccgtttgcttctccctgactggaaagatcatgatggttgttggagcacatctcagatcctgtgggagatattcctgagggctcacaggcactccccattagacatacccaagtgaagtgtgtctagtgggaaattaggttacttgccatggagccggccctgtgaggaggccttcacttctgtccagcagagctcagcagcccctggcttgaggtttcaggaggacgctcaggtgaatgcggctgtcccccaacactgttgaagactccacagggagggagcgcctcattcccattccccagccacctggtgacgaactgaactggcttctgtgcctcacccaggcctcagggaggctcgtgggctgtgagcacctcccacatttctgcatgagatggggcctgtatgcagatgacttacattctggcaccaccacactcccatatcaaaaacacacccaccccacgtcacacccctgggagcccgggaggcccccttttctggagacttgctgagagcatttgttcccagtcagtggggaactccacacacatgaagagtcaatttgcttttctcatcccaggagtggaggctgtgatggaacctctgacgatggaggggagggagtttccccgtttcagggcgtgatcttggctccagatccaagaggaagctagctgccttccccaccctccgaccacacacatgcttggcttgttgcggtggtggctgttttctacatttcctttgaagagtgatttagatctgaagtcagagtgtcaggacttccagaggccacagcagcctcttctctgctcccttgggactgcgcttccacacgtggggcagaggcgggggctggcactgggtgagggggtgatgggaagaggcgtcgcctcactcctgagaagccttgccacgtgttgatgtgtatgggtctggctgctggcttccccaggtcaccgacttattttttaaatttcctttaaattactcaggtaacacacaaatacgcctccttgttaaaaaattacatataacgctgtctgctggaggctttggccctggtgtagcctgggcccaaggaagcctcattacacccctccgagaaccaggctgtggccaccaggtttttgttcatcttttctattatgtgaggttggtgctgcagttttcctgctgatgcccctctgtggtcctggtggctgcaggacacagggccctctgttgtctgtgcaagagttcacagcaggctgtggctttgggaagacagaggagaagatgtcttttccaggcggttttaagagaccctgtgatggattaaaataaccctaagatacggggcggcaggggtgggggacaaagcaaaaagagtaaacgttccattttgccaaaacattagtagtagacagcactaggataattgggttgaggctggaggagctgtcagacagatgctgcgatgatagccctgtgagtcctttggttctgcagtggggtccgaggtgcctgtcaggggcaccagagctgctgcttcctgggaaaggaggggcttttggtcgaggccaggatggcgctcatgaggggggctgccctcgtggctctgtcctgcacaagtcagtgccttcctgagggctggtcaccctgaaatgggggaagggtctcattggagcaatgatggctcaggaatgggtcacagaacagagcaggcatcggacaaataagagatgcttgacttgactgactgggaatccatcagacaccatttatcccggagccatgccacctctgagcagccctgggtcctggtggagtcgctggcctcctgagcctccaactatggctcctgaaggtgtctgtgcctttcatttagggtagagcatagctgcagagtcctccgagctggcacccaggagcagcccaggagagaacgccagtctccggaacaaggtggtctcatggacctgttcactgattcttttgttcattcattgaacagatatttagtaagcacctgctgtatgccagatgccctctaggtcctggggatgcagccgtgaatgagacagaagctctatcctttctgtagtggatattgtagaggggaaggtagcaaacacacacagtggacagtggatatgtaatatgccacatggtgatcaagactatgaaaacatcagtgagtggaatggagctagagtgggcagggtgccggtgctgtttagaacaggtagggaagggaaggtctctctgaggagctcctcctgcagaggcctggtagggagtggggaagagcctgtggctacctggtggggagtggggagggagcctgtggctgcctggtggggagcaccctatggggaggcacgtcctaggaggaggagtgtcctagagggagggcccggcacctgccagggcccttgggtgggttggggagggcagagcagagggcagcatgacctgggccaggtgatgtgggaccacacccacaatggatggagatagacatcagtggctatgcctgtccctacctgaggtcgcccagctgtaagggtctcgctctcacatcagtgctgagaaccaggggcctcttcagcagcgtcatgcatcgtgtttgctttctttcatttcagacacgtaagcagcacagtgaggccaccaacagcagcaaccgagtcttcgtgtactgcgccttcctggacttcaggtaccctctgcacaggggagagcaggtgggcatgaggtgtccaagcccaggcccgccccatgccagcccaggggaggatctgggtcacccatttctgcagctgacatggttgcgttatgcgaaaatgctggaaatgctggagatgtgggcagggcctggtggcagtgctgggtggaggcctcccctccagaccatgcgaggaggggcctgctgttgcacgatgtgtctggacaaagcctctgaatgcccagggcaactttcaagccagtgcagcagatgctcgggggagctggaggatgctgtccgttggagcaggccctacagccctggctgtccccctcgagggtcttggagcagctgaggaagggggttgggggagtggcttctgactagccacgttggcattttcctgtttgaaaccttgccggctccactggagcaggctgaccatcaggcctgcctaaaactctgaggcctcagcctctgccacttgggccctgactgggacgtcctccccagcatctcccatgtccacttgtcacacctgtcacatgcagtctcctcccgccctcctagcccctgccccagctcgcctccacggctcacctgcccaatgtctgggggatctcccaccatcgctgtgatcacaattctcctctagacgtgagcccaccgtgaatggctcccacagtcacagcggtgttgaaaactcagctccccgcagggccggggagtggagggaggggtggggcctccggatcctcagctgctgctcagctgtggcccctggggcttgttccatgtgggatgcaggttgcaggtcctgtgttgccaggtcatcagttttcatggctggatattgtttttgtttttgtttttttgagacagggtctcactctgtcacccaggctggagtgcagtggtgtgatcttagctcaatgtagtctgaaactcctgggctcaagcaatccttccgcctctcaaagtgcctctcaaagtcctgggactacaggtgtgagtcactgtgcctggctatggctagattattatatgaactgtcccaatgtttaaaacactgcacaggcagctggaacacatctgggacatccagttcacaccctgcctagtggcccatcaccctgcatgttgtcagggctccccaacacctgggcatcttcctgtgcctggactcacttccccagctccctcctcctgctgcttcagggcaggatccacacaggctgtgccacctctgctggtatggtccccgtcagagaaagcgtctctgctccctgcacccagagggccaggagattgcaagacgctgagctgggggtgcagcagcaggtcggcataatctccctttatctctgttctgtgaacagcgaggaaagtgcagcccagctcctgtcacctccagcaaacactgcttacatttttgacccccgggatgcctcactctggctatggccgtcggcgtctggctatgaccgttggcgtcatgcctctgcaatgtggattgatgctctgtaatttcagtgattttgccctggtcaggctcagcaggttgcagctctttttcctttatttgtaaattgtgaaaatttggaagcatgtgctcctagaaatagttattccaattccggggcactgtttggagaaaaaaattatgactagaaaacgggatgggatttggtaagaactaaattggcatgttgattcttatttttgaaggaattttaagaacatagaaaagtacggagaataatataacaaatgcaggtacccattgccccaaatttatagttattagcatgtttatatttttgtatttttaagaatgaaacaactaaaacatcacagatgatgttaacgaaccctccacctccttctgttcttttccctcaattcctagaggcagccaccatcatgaatatagtatctgtatccttcctgtccattgtgcaattattacttattattatataattgatattcagaaaaatccacacttgtagatgattgtacagttctgtgagttttgacaaatgaatacagttgtgcaaccaccgtaatcaggattagaacaatccatcaccctccaagatgcccccgtgtctgtttgcagtcatcccttcctctcacgtccggctcctgcaagcaccgatttgtcttctgttcctatatagttttgcttctgccagagtgtgcatagatggaatcatggcgcaggaagccttttggagtctagcctctttaattttgcatagtgtgttgagcgtcaccacacatgtattgttggatatatcaacatcttgttttcacatttcactgctgagggggtattccgttacatggatgtaccgtagtttatttatcttctcccgagtagaggaacatttgggtagttttcagagtgggatcattatgattaaagctggaagtttcaccagctttgcttttgtggggtaaaccacacttggtcatgatgtattatctttttgtatactgctaaatctaattggctacagttgttgagaatttttgtgtctacgtgcatgttggatattggtctgcagttttctttttttggtaatgtctttgtttttatatcgaggtaatgatacctttataaaagttacattttgggatgcactttggaatagtctgtatagaattgatattatttcttccattttagtagaattcaccatgaagtcacctgagccttcattttcaatgttggcaggttttcaactacacattcagtttcttttatggatgcaggactatgtaggtcgtctacttctttttaaataagttcaagcagtttatgtttttttgaaatattcatcaatttcatcaaagttgtttaatttataggcacagagttttttgtggtattccgttgttagcctttttcatgcctgaagggtctgtggtgatgttcccatttcacttttttatctataatctgtgtcttcttttttctgagtcactcttactataggtttattaattttattgatatttttccaaagatataacttttggcttcattgatttttctctcttgtgtttctgttgtcaatttcattggcttatcctctttgtctttaatttacttccttcagctttctttgagtttaatttgctcttcattttaaaagttcttaaaatgtaggtttaggttattactatgaagctttattattttctaatataaacatttaatgctatattttttctgtgagcactgatctagctgcattgcacacattttgatatgtttttattttgattaaatttaaaatattttctaattttccttgtgacttcctcttcaacctcttcaacctatgtgttattttgaagtgtgtagtttaattccaaatagttgggaattttccagagagctttctgctgttgatttgtaaatagtttttttatgatcagaaaatattctttgtataattttagttcttttaaatttgttaaaagtttttatgacacccccatatatgttcagtctttgatgaaagtcccatgtgcacttgaaaaaaagtatattcttggtggagtgttctataaatgtcaattacaccaagtcgattgatagttaagattatgtcttctatattcttactactacttttctgtcaacttgttctgtcaattaaagagagaggagtgtgaattctccaattttagtggtggatttacctatgtctacttctagttttattcttttttttatgttttttgagacagagtctcgctctgtaacccaggctggagtgcagtggcatggtctcggctcactgcaagctccgcctcccaggttcacgccgttctcctgcctcagcctcccgagtagctgggactacaggcgcccgccaccacgcccggctaattttttgtatttttagtagagacggggtttcaccgtgttagccaggatggtctcgatctcctgacctcgtgatccgcccgcctcggcctcccaaagtgctgggattacaggcgtgagccactgcacccggcctagttttatgaatttttctttaatgaattttgaagttctgttattaggtgcatgtatgtttaggattgttatgtcttcttggaagattagcccttttatcattacataatgtccctctttaccctgggaaatatgcgttactttgaagtctacttagtttaatttagataaaactactctagctttgttgattagtgtttgagtgctgtatcttttcccataatttaacttttatcttatttatatatttatatttaaagtgagtttcttttagactgcatgtagctgggtcgtgtcttttctttaatccagtcctaaaatttctgtttttaattgacatgtttagacaatttatatttcatgtaatcattggtgtggctggattaaaatctaccattttgctagatgtcttctaacttttctatctttttaaaatgttgtctttttctgacttcatttggattgttggatatcttttatgatgctattttatctctactataaatgatttctaatgtatacatccttttaacttttttgatagtggttgacctaagcttacagtgtatatatgtctaattcattcatgcctgccttcaagtactatgatatcattccaaatatattctaagacattgtaacaataggttcacacttcctcctgcccgttctgtgtgctgttgttgtagtacatttcacctttgtacagacaccataaacgcaatgcattgctagtattttttcccccggataatgagttatcttctagagcaattaaaattaagacaataataattgcctgtttaccttcacttattccacttccagctgttctatttctttgtgtagatttttgtctagtatcatactcctttaactcttcttgcagttctggtccactggcaatagattcagttaccatttgaaaaagtattctcttttagtcttgaaagattttcattgggcttagaattctgggccactttttttctagactgatactttaagaaattatacaagtaatatatcaatatattattttgttcaaaagtaaaacattatagaaaagcaagtgttccctttgatctttacctcttatcctgatctccacccctttccccagtaataaccacggtgggagggttttttatgtgttttttcaataatttatatataatttatatttataatcataggaaatatatggtgttgcttaattcaatgtgtcttccatccttcctccaccttttgtttctgtgttttgcctgtgtggacacacatgttttttaccgtatttatgcatgttacattttatgtatgcatgactgaacatttttctgtttagatgcagacttcctgggtcatagggccgtacatatctttaatgctattgatactgcttcatctggcttccatagcagatttatttatgcacaagctgcaagcctgcctctttgttttcgctgagtccctgggaagtagatcttcattgatgccactgaaggctctactcctctggctaactaggtcatcgtcacacctttgcagctccatctgagcgatgtgactttcatattgtttagcttaccctttgtgtaagcagaaggggcagctcatacccgtggctacgttcacctaatccaatgcctgttaatgttcaggcccccccctcaaattgaagtatggtacttatgcagccaattgacagacaaaggcgcaatatataacacaacagctggtttttgctgactccctccaaggtcctgggaaaattagatcaaaaggggtggggagggagaggaggaggacatgaccctgtctttaagtcccatcaattctgaagttattaatggggttttgctcctctcagttggtacgtctgagtggctctcgctttgtcctctgctctctgctaaatgccttctccctcccctagaagagcagatcattaatcatgaaaatcaccactgaactgctgtctgagtctccatcctcaaactcagagccacccctgggtcatgtcggaaagaccgtcccaacccctccctcgcgctccacgtcgcccagggctaacgcagggttaccgttgcccgaggctgctggtgcgtgttccatctggtagacattggccagagaggtacaagctggggtcttcatcggtcatgccatcggacagccacagttctcatctgccacatccatgctgacaccgcagttgaaagtgaattcaaagcaaatacaaactagagccttttaatttattcgcctttatgaatgctttcccccaagggccattgcctttggctgaagtaaggatttgtctttactgataacttgaggttccaacttcagggaagaaccatttaaatctttttttttttttaatttgaaaatatagaagacagggtacagtggctcacgcctataatcctagtactttgggaggctgaggcaggaaggttgttttagcccaggagtttgagaccagccagagcaacatagcaagactatatctctacaaaaataaaaagaaaagtattaattgggcacagtggcatgcacctgtagtcccagctacttgggaggctgaggtgggaggatcacgtgagcgcaggaggtcaagactgcagtgagctatgatcacaccactgtactccagcctgcgaaacagattgagaccctgtctcaaagcaaacaaacaaacaaaaaagaaaatatagagaaatgtagagaagaaaatgatattcaccaatattcacaccaacaggtttaaccacagttaaccgagagcacgtttgcttccagtcatttttgtctggctttatattttataaagttacgcaagtaatatatccacacgttattcacgtaaaaagtaaaacataaaaaagcaagggtctccttagacctttacgtctcatcctgatctcgccaccctgtctctggcggtaacaccgtggggagtttctgtgtgagcgttttctctgtagtctctgtgccggtcatagctgtgttcgtgggaagtgtgtggtgctgttggctccacgggccttgcgtcgtggttagtcactgtacgttgtgttttggtattttatccttatcagtgcacattggtcaaggatgttctttttaaccgatgcgaggtcttttatcatatttctctctcccacactgcactcacccgtttcccccgatgggcatttatgttaccgtcactcatgattcagtgactgggcttgaatgtggtccctggcgtgtgccgctgcccgttctctaggcgcagggctgtgggccatgtgcgtttcattttgtgctgggcttggtccaggtgcttttcagggtgattgtgcgaagcagctcccccttccctgtcccagagggagggccttgcttcctgtggcctgaccagcagcagacactctccagctctcgccagcctgatggccagaatctctcctcccaacccccacaccacggtctgggtgtgcattcctggcgtggcaggtgtgggcgccgccatgagttcacggggccatgtgttatggggggtgctgctctcagtcccctgcctgccaagggtgcggtgctacctcctctgatcctttctcctgtgtcctcagctccggagaaggggtctggtcgaaccacggctgtgcgctcacgagaggaaacctcacctactccgtctgccgctgcactcacctcaccaactttgccatcctcatgcaggtggtcccgctggaggtaagagccaggcctcaggggtcgcgggacctgggggacgtaccatgaggctgcaggtgggggcgggaggatgctttgcccgccagtgcccacgggccctgggcacattactccatggggcctgtgtttacagacggaatccattctcttggcttctgtagtccagggtcctgcatgtattgggtgccagcaaatatccgaggagcccatgattgtgtaaatcgagtccagtgtggtgtgcttcgcacagcaacgcccagactgcacctggggggatccaaggagggacccctcatccctccatctgtccctctggcagattctcactgggcgcctgctgggagccgggcgctgggggctccgctgtaaacaagaaaaacaacacagtcctgctcttgaggagtttgtgttctagtgggaaagacagataataaacaaaccagcagataaattagtcactttgaatcagtggaggaagaaagtggaagagaacagcccagtagaagatgacctcagggaacgaggctgtgttcacggagtggtgaggagacagcggggagcggggcgtcttcacggagcggtgaggagaggtgtctccgggatgtggcgtctgaatggccagaggaagctgatgtcttgaaggcctgggggcagaatgttctaggccaggaaacagcaagtgcacaggacaaggggcaggaaggggcttggcatggccgtggatggagcaccctgagctccaaggccctggggaggcgggaggcagggaggagcaggctcggctccagcatccaggcctcagggaggagcgtgagtttcattctagatgcatacgaagcctttggagagctgtgcctgggagcagcttggtctgagctaccctgggtttggggtggggcacgtagacgctcatgtaggtggaaaccaggagtggaaggaggtgttgctgctgacactgcacactgcacacccacactcacgtctgtcggttgcgctcacagaagggctggtttggacagcatagatgtggctgctccgagccaggctgggtttggcagatgtgttgggaaacggcgatctgttggatgctgggctgtaacctgtggctggtgttgggcattttggggcctgagagagggccaggctggagggtaagtcaggcagggaagcagtgacgcctccagcgtctcccggacagatttgtcacgagactcatcttccgtgcggagccctggtcttttagagcctcatgtgctcatcgtggccactgacttctggaggctcgtccccagtctagggctcttcagggtggctttgggaggagtcaggatgtctctgatcacagcagctcccgggagggggcaccaagctcaggtggttcccagcaggcactttgtcaccagggcttgaacacccgtccctgcctgggtcactgcctgcctctgtggtcacatttatcaaggctgtggacaggcagaatctacctgaatccaccagcgtccgcagtgtctgcactgggccagagggtgatgctgccccgcgtgtcctgcgtggttttgtgtgggttttgggggtgttgaatgggttgggcttccactgtcctgttgaccaggagacagaactcttcaaggtgtaacggaggcagaatcctagcttcgccttctcccatcctgggagacttttcctattccagaaagagggcccaggaatgcagcctcccaggggtgctgtgggaaggacacgagtccactgcgacacagtcacggatccagcgctcagcccaggcgcccctcgctccctaacagaaaccaccagcaaacctaagccacggggttctgtgtgcagaggcctgatggaccacagttaactctcagatcaatggagacagggccctggtttttggaagtgacttgtaatgctgctggggcagatggagataacctcatctttaaattccatggaaaataaaatggcagatgctcctgagctgcagcccctcacagggcgaaagacgcacgtggcacctgcagccagtgtgatcccggcctcactggccgacgggcagctgctcacgtgagcgcgtatgagcctcactctgcagaagacgccagagggaaacagctattcctgtttccaaagagaaggccctttcttttcacaaaatgcatgcttgatgtcacactgtgaattacttatggagactgcagagagatgtccaagccatattttatttttattaaattaaataaattaatttttagagacagggtctcaccctgttgcccaggctggagtgcagtggtttgatcatggctcactacagccttgaactcctgggctcaggctatcctcccacctcagcctcccaagtagctgggactacaggcacatgccacaacgcctggctaattttaaattttttcgtagcaatgggttctcaccatgttcctcaggctggtcttgaactcctggcttcaagcaatcctcccaccttagcctacaaagtgctgggattacaggtgtgagccactgcaccagcttttttatgtgcatgtattaattttctgtagagatggggcctcactttgtggcccaggctctgagacatatcttaagtggataggagggggcaccattcaccctcgggtccctcgtgcacagacacacacccagcatcctagacctacgtgctttggagcctggacccaggagcccttggcgctgcgtgagatgaaatgtcaggtgacaggggaccggcagcctcctcagtagcttccatgccgcagggtcccccaagaagggccggccacgaagcaagtggaactgccaagcccttgcgtgccggggctttccggctcagggccgtggggttttagaggttccgaaggggcggctctgttgtgaggctggtgggacccaagcccacccgttgcccgcacccttcagtggtaaatattgtgcaggcagctgtgacccgccagataatcccgaggggatgttccttaaggagtgtttcccctagagcagctgccccgccagcgactgccccttcccagtccccacgccccccccatgccttcccagtggcccctcttctcctggcctgcagaccccacagcctccatgtggaggtgggcccttcgcggctggggagggccatgacctggatcattggcggcaatttaaagaaaattaaacagagtaaatgaaaccacaccagagggcggtgaacgtagaaacagttcctgggtttaaatttcttgccatggaccaggcctcagtttgaggagcaccgtcctctgcggacggccgtgacgccttctctctcctcccacgggctccgtttctcctctcccctcccgccagggcccggcccacagggctccctttgggcttccctcgtggtgtcgtagggagcagcccaggggagaaggcgcagagctgcccccatggagagcacctgttcgttcctggagatgggcggactgcacggtgctgtggccaaggctgctcgtcttaccagcagagaaactgagccccagagagaggggggcgcttgctggtggtcgcccgtcgttcaacagcgtgttattgaattaccggtagagcctgggctgtttaggtagcacccgggccatggggacctggcagtgaggatgctgtggcacgcacagagacacagcaagtcagtgcacgccacgtcctgccccgtaagggccacgcgggagatcatgtcggatgacttgtggataattaggctctaaaacgcagtcctggtgatgccggagctgtttgaaagacggaagcccaggagggcctgcctgagaaggtggcggtggattttacatctcagggtggagaggatggagcctcccggccctgagcaaggacagtccgggcagaggacagggtggggacggagggcaaggagggagcagccaggggtggtcctcggggaaacgccagggcggaggcaggggctccaggcccaggggtcgtgaggggcaggaggcggggagcaggagaggtggcggaggctgctgcggtgactcgagaagcggcagcccgctggtgtggcgggggtggaggggcacgagtcccactgcagatgaccagggttgccccatcttcgactaagaaagctggcgatctgtttctcccacgaaatcttctgactgttagaggtgtcgtcagttattacttctgagccatatgtgagaggtcatctgtgtgctgaccagacgcctggggtcttgtgaagatgcagaccccacattcagggggtctggggtggggcctggcatcctcatttccgacaaggcccgggtggagtgaggccccaccggtcccagaccaccctctgagcagccccaggcacaggcgcccagtctgcaaacatcagctcgcatttctgttcgtgtcatgggacccggctgcagcaactgttaccaaatctgaggatggatagtccggccccacatgtgtgctcgttggcatgtgaagaacttcccttgtcgcaggagctgaggggggaactggagagacaggtcctcagcctggaagtgagtgaagagagaacctggaagattcagagacaaaagaaatagaccatgggttaaaaaggagcccgaaccaagggccagtgggcggggcttctggacacaggcattgccttcagggaacggggaacgtcttccttcatgcacagctctgcagagtgggcaccggccccactggctgccgggagccatttattgaatgctggctggtgattgtggccttcacacagccgaccacctgggagtaaggggaagacagtaacaggcaccatttcagatgctccctgcctgtagatgctcttaactgttggataccccctgcctgcaagtgctccctgccagtgggtgctcacttcctggtagtgctcctggccagtgagtgctccctacctgatgggtgctcccggccagtgagtgctccttgcctggaaggtgctccctgcctatgggggctccctgcctgtggatgctccctgcctcattggggcttgcattcaggcctgccctctccttcagtccacaccacacgagtgaggtgctgtcatgtggccatcacagacaagagtcataggtgattccctgaggtcacatcagggggcagagcccagccttgagccaaatcccgaatgttggggttgtgcccatgctctggagcatcagctgcctgggagcagagcctcctcctctggatcctctataggctgagaactaaagcccagtgtgacttccttcttggcatggccagagagagggggagttacactttcagctgaaaactgtgtttttgtgtgttgtgtgtttgtggtagaggaaggaagggaagggcccagtccagcgagtaaaaaacctgggacagagacgacttacggtctcgatccgtcaccgttccctctcagtgacactggattttgacagtctgtgggtgtcttcgtgggagcaaatcgcatctattcattgccagaaaaggttgatttgaaaatggtttaaaattatctgtgctaaaaatgaacattctcatcaacattaaaaaaagttaaggctgatatcataagtagaaaccaaatttgcagcatactcagagaattaataaaaatagcaccagtgaccttatttctgtgacctggagtcatgtcttccacggggccctgggctcgcactgctggtctttgggttcctggtgcaggctttctgctcaggagctcacatcctcatcgtgtcccttctctctccgaggttttcccctggcttttctccatatccagcctcctccttggcggttgtttcgggaagccctcttcctcctaagtgggcagtgtcctttttgtggaaagcctatcagacaacagagttcacctgagtgaactggacctagctggggtgggctccagggctgctgtccaggggagggagaccccaaaacgacactctgtctttgcatgctgctgtcaacatggtgattagggcccaggccctgaggagccatgtcaaggcatctgctgatggacactgcgatggcttccagcatctggcgacttccagtggttccggagtgcatgaccctgcacatgcttctttagaataaattcctggcaggtgaatctgtgggcaaagggcacaggcattttgattttgaaagacattgccgcattgcactctgggaaccgtgtaccaatttattgctcctccagccagggtcaagaatgggtagctttgctttacatgtgagtcacagaaacatggcgtcatctctgggtgcttctaacttctcctgctgagtgcagttcaagcaggggaacgaacccctgggctgtccagtagatctgcatccagacccacccttcaccaccccaactgctccactccccaggcctgatttctgcccctttgaaattagcaaccccagatccagtaagaacccagagaaggcaagtttttcttttaattggataaaattatcctagaaaagtaggccattggaacagatagagaattcatccagaacagaccctgtaacttctcagtacacccatgagaatctatgtcagagaattaaaagaatcagcaagtaagatgacataaaaaagtataaaatcagaatattgacattatttatagtagaaataacagaagcatgaataaacataacactaatgattgtgtaaattctaatacatccacgctaagggagattattcatctctatactaaaagaggaatgatgaagtcacgaaacgcggtgtaactgtgaaagaatggggttgtcaccatgccagtgcgtttgcagggatttccaaggtaacattgtgtgaaaaggacaagacgtagactagagtgatacatatcccatttttgtaaagccacgccaaaatcccctatgcgtgggtgtgtttctgtatatgtgtttaaatatgcaacatttgtatcttggtatgtgattatcagaaaggcacgggcagtgcattcaaggttgttagtgggccggggcgaggagggggccacagaggtgaggcagtggcaggagctggggagagaaaggactgtaaacaccagcctgtgggctctgacccaggtgtgtatttgtgtggaattgtgtgatatgatcaaatgagtaaagtcagcctgctggcagaggtgtttctgaggcctgctacccaggggtggtgtttcatgttcactgcgccttcctgatgtccgggtgctgagacacgcccatgcctgtgtttgctgtatgaatgagggtatggaggagtgagtctgttccacaagaggagaggaacttagggaaagagatgtgttctccttggaggccagaatgccacatgcgtgctggtttagtcggtggatcccagtcatgctggcacaactggtctgtactgccgcaggtaggtgggagctcaactttctgtcctccctaaggactggctggcagggtgcgagggagtgaggacctgaggttaacacaggggtggatgcaggtgtgggctggctcagccagggaccgagaggagggctcaggcgtgcactactcagcgtttcttgctgaagccacacacccaatgaaggtgctgggcatggggactggtgccgtggaaggcatttgggcctggccttagggaaaattcagctgcacctactcctggcgcttgtgttccccgctcagggtgtgcaggccagggaggtggtctggttgtctaaggtgggagagcccccgatattgatagacagtcctgccaaggctgcacccagtgggaagggcagtggtcgaggagcgtgtgggaggttgggaggagtcccagggcccgccacggtgcgctctttcttcctgcaggtggccacttcctcccaggcggccacttcccaggcttcaggcatgggaagcgtcccaggcatgggcacctgccttggggtggctctgacctggggggtgcaggagccctgtgccagtacaggagcacctgggaatgccagtccccgagcacccgctcctggggcctggtggtcacagggaaaaagcatttcaataggacggtcatgaaccgtggtctgaaggctgactctggccagtgactgggcttctcctagcccacagaggcttaaatttttaaaaattggttgtcagtattccaaaacacagacattttatctaaaatttgggatttctttttttttttttttaaataaaacaagaagaggaagatgtggccacgctgggcttccccctctggctggaaacgatgctggaggcgagtggctaccacccctgcactcagggcgaggtccccagggccccccggtccccatggcctccccgtaccacaagcagctgcccctcctcatcacgttcgcatcgctcttctgcttttaggagacagtgaaatgcttcctgctcttgtcttggtgggaaagtgacatatgcactgagaaggacttgggttagaactgtgggagggaggatgcttgttttggcagcacagtcccacctggtggttatgtctgcaggcccccactggcctcctgagctgatgccctgcctctcaggaggcatttgaggttgtagtttctgagtcagaggagtccgtgtcctgaaaccaactgcaggcttttctgggcatttctaaatctagctatgggtgggaaaggaagggcaccgtgggggcacaccacgccttcctgaggcaggaacggcagtgcagcctccgcccagacccatggttctaggccccgtgccccgcggttacccagccaggtgcagccttgagcctctcagatgggccctggctccagggaagggcacagggcgggcagtggcaggggcctgaattacacggtgttgctgggagctgtgagaaccactctgagctgtatttgcggtcccgagggtgtgtcacaggcgggactgtgccaactgcagtgccggcagccgcagcatgtacagctcaagtcagaaacaggctccctccacggggtctctgtgtgaatgttagccagaccacctcccaataacacctcctgcatgcagctggggttagtagtggcccctctgcctcccagccagctggacacacaggtccctcccagtgatgtgccaggtggccttgggcaggtgcctgctctgagcctcagtttccccgctgtgacatgggtgggaccctttccttgtggagctgtggtggtgatgaggaggcagaagtaagcacagctcaggcccaagcacccagcctcagcagcacccagcctcagcacccagccctgagcacccagcctcagcacccagccctgagcacccagcctcagcacccagcgtcagcacccagcctcagtccccagcctcagcacccagcctcggcacccagccctgagcacccagtctcagcacccagccctgagcacccagcctcggtacccagccctgagcacccagtctcagtacacagcctcagtacccagcctcagcacccagccccaaacactgcctgacagagtgaagtcacagtgagccatgagtatgaggtccctagggatgtcctggccctgaggacccctgagagtggagtgggagtggggtggggtggagcaggcctggctactgcacctgggactgcagccatcccagcattgacccgttcatggccacaagtctccttccattcactcttcataaggaaggttcagtcctgtggctgtgggcaccggggcaggacggtctattgccctgttgatgggggtgggggtaactgtggaggctggaggggctccaaggagaggcccctccacccatccctggacccctctaatcctggaggcagaagagggtcctgccttgcccaggagtaacaaggaagttggtttgttcagcagcgcccccccgactccccaagcaatactgtggttcaccagtgtcttctggctgagtggggagggcatgcatcctcagtaccatcctcttagagacccagaaaattgtcaccatcccttctgatttcccagcctgtgcagttcttccagaaggagagggtggtgggcaaagcctgctgggtccttctgcatgggctccttaccattccaccagcaagccctccaggtgcacgggtgcacgctgttcccgccccgccttacagatgagttttcctgagccctgtcctgggctgctgagagctgggctggggatgggagctgggagctcacccgggggaggcgcaggggcatgcgtccttccaccccctcccgtctcctgccctacccaccccttcccatgcccctccagtctccctcgagacgccccctctcagcccccagggccctcccctgtaccctgtggcctgtgcctctctgagtggagagctgagtgagccctgggaacagggctgacacctgccacccccatctctcccttcagtccccccgactctcaggctgctggccacctgggacattgggaaatgggcctaagaggtaaaaacctgcacttcgaggtggagcagcagccagttgctgccgggactcagctttgctgtcagctcagccccagccctgcctgggcaccttgcagtcctgggggcagggagacgtagcttcaaggttctgagggttccacccctgcccctcttgacaaattcaattgccgttgcctcctccaaccagacccaggctgctccttttagaggagaagcatatgttgcttcatttattccctaattctcctgaagaagtgtctgctctggagtgtgctgggctggagccgctctgcagagggagctgcagcagcctctggggtggtcctgtcttgggggatcttctttcggggctaccctcagaattggggtcttactctgtggggctgagggtgggccgggtgaccaggactgggaacatggtcaggggccagactggacgttcccagggcagatggacgcatagcccggccgagggatcgggtcgctttgcggggcagctgtgggctgcaaggctgtggtcagggcttgacgtctgaagcaggccaggtttctggtcaacacgtattttttgtcatgagtgtgttgaatcttgggaattagagtggggatgtgggccgtctttgagaagccgccagcccccgtgttaggagtgggacaggagctcgagggttctttttgggacatacaggaagctggggtgtcaggagacagaggggttctgtaggttgaattgtttgtaaagatgatacacgcatgtgggaaaatgcaagaacacagaaggcagagtgtggaaactgacggtcacggccaccgttcccgcctcccagccctgcccagagcagcggcttagggtcacggccaccattcctgcctcccggccctgcccagagcagcggcctagacacgcgcttgcttttctgtcattccagacgcagttgctgagcctggggccccgctttgctctttgttctttttttgtttgtttttaaaattttctgtacctcaatggatgcaaaccttcctttaaacaaagggtagtgaagcataaagactgcaccctttatttttatttacaatttatttgtgttagagacaaggttgcacgctgtggtccaggctggagtcagtggcgccaccttggctcactgcagccttgacctcctgggctccagagatcctcctacctcagcctcccaagcagctgagactagaggtgtgcaccaccatgcctggcaagatagcacactttaaaaaatgtatgcacgtatcttggaggttgctccttctcagggtacacagagccacatctcccgtgttaaccactgcatagctctcccgcgggtggacactgaagtcatggtggtctttggccgcagcaaataaccagcatcctatgcacacatcccgcctccatctgtgaggatgggttcccgtggggcactgctggtccaggtttacatcccgcctccatctgtgaggatgggttcccgtggggcactgccggtccagttttatatcccgcctccatctgtgaggatgggttcccgtggggcactgccagtccaggtttacatcgccacaactgtttaaagcagccatcgtctggggcacagtggggactcagccctgagttcccagtcatgttgagtcctgggttctgctctgagatccacctgcctcctgctgcccggctctgcctcccacggccgaccactgtgctgagttgcaggtctgtcacttggggcaggtgatgggaggggaggaggcccagcagctcttctctcgcccctacacgtggctttttgggcagtggccacgcctctgctgtggctgcagccctgctggacagtctatggatctggcttccacggggggatttgtggcgaggctcattcctgggccacctcactacccctatgaggtccccctttctctcccctcccgagggttagcaattccctgagtcaaatgttccactctttgaaaggctggagtggtttctgttttcccagatggccccagactgatgcacaagctgtgcggccaggggagacagcaggagcccccagggttcctggtctggaaaacaagagggtgatggtccccccagctgacactttcaacaaggtcactgtgacccgaggcaggccagtcccagcatctgttcaaacacacagcagcccagctgggtcctcggggaagatctcctgcctgtggccagtcctctcccgtcctgcagcacccctcaagtggccaagcagctcatttctacctgtccccgggctgtcggttcatttccatcagtggacgtgaaatgtgccagcaactggacccagcccgggggaggctggctgcatgctgctggcacatgctacggctgcctacggccagggatggccgccaaaccagggatgcctggagtcacagatccgccagggcctggtcactcgtgctgtccaggagccaagggcaggagtgcagcccagccaggggctgagggctgccctgaggggagacaggccccgtgagagcctggatgccagccgcggagagaccagagacaggcaggagccagcctggccgggacagggtgggcgtcaaaggttggggagcagatggttggttcaagggctggtgtgggggtggagtgtggacctagcccggagttcctgctcttgtgcccgggagcccatcctctgctcaccctgctctctgccctacgcttggcttcctgccaagtccaaccaaggagagatggtgctgctggggtgggcgaaggggccagcctcctgcctgggctcctgctggcatgggcgtccccctgtggctccagcgcctgcatgcagaccctcccctgcacccccgcgccagcctcacctgggcaggctggtctggttccagtttctgctggtggcccggcctggctctgctgctgtcccctctcccactgtcctcccgcggtggccgctgtctgggcctcacttccttctcccgcagtggctgctgtctgggctgcctcactgccttctctgctttttcagggcttccctcaccttcataaccagctccccaagtccaatcccgagcggggagggtcttgctttcccatgatgaagggagagggtggatggaggcaggtcagaggcacgggctggggctggagcatgcggggcctcagaagccatggtgggggaatgggggtttgagtctgagactcaggcgctatggagggggtgagccatgagggacgaggctccagtgtacagcggaacccaagccaggagggacatggtagaggatggggctggtgctgtggggagaccagggaagcccaggaggctgaagagatcaaggcagaggctctagaaatccatcagaaagaggattgggacagatggccagtggtgagaagccagcaggactcggaggtgggtgctccaagggagagggaagggcctgggtcagggcctttctcagatcatggccgtgtgagggccaccatccctcttccctctgcagtcacctccgccaccgcccctgtgtgtttccatcacagcctcatcaacacgacactggcagccttaggtatttattcacgtttacacatccacgtctttgttcatcacccgcttccccactgcaatgagacttccgtgcatggtgcacagtaggtgctgaatacatgcttgctgctgtagcaggggccatcacgggtcagccccagccctgcctctcgccagctgcatggtggtgggcagtcatttactgcggctgcctcagtgtcctcatctgtaaagggaaaccatgctgtccactcacaggcttgctctgaggagtcgatgccttcaagcagcaggtgcctcgtttctgtcatttccaaccactcttctgtgattctccatgatgcctagagtttgccagatcctctgtcgggccccggggattcagaattaaacaagacagtcgacctgtcttcatggaacttaccgtcagagctcacatcactctggtctagaaggctgtctcctgtcctgtctgtcaggttcctgcccaagcattgaggcctgtgtgaagccctctccctcctaacgcccactcagtatttctctccccctccttcagatcaccctccctcccttccagtttcctaaggctgtgtgcaggtcgtggtggagtcaacatttaacacaggttgcagggttaagtaatacaatgacaaatccatggctgaatgtgtgttacaactagaaagtccctgtagtaaagagaaggcagtgagccactatcaggatcacctagattgtcaccttctgcctcagtccactctgtggacttgaaagctgtgttgaagcagtgaggtttgcagaccctgacgtgtgcatgccatttcttcttgatccctcctgaagtcggcctcattattcagaccattgtgtggaagaagaatgtataacgttacatgcagaagccatggagactccagtttatgggagatctcaggagttttcaaaggtcattttgatcatctatcatttttacctatgggctcaccttataactcaagcaccatgtaccatgtgaccctccaatatgtctggccttatgtttcttacaatcatttcaaggctgcctggtcaggctattagctcagttcaagggaagagccatatgtctttctttttagtactccccattgtgcctggcatgatgctggctttgggtgggtttgataaaagtacatgataaagagacttgattgatggtggggttggttcatggtggggttggttgatggtgaggtttgctggtggtaagtttggttgaagatagggttggttgacagtaggttggttgagggtaggattggctgaagataaagttggttgatgatgggttggttgatgatgggtttgattgataatcaggttgattgataggttggtttatgatgcatttggttaatgggttggttaatggttaggttagttggtagtgggttggttgaaggtgagtttatgatgagtttggttgatgatgcgtcagttgatggtagagttggttgatagtggattacttgaaggtaaggttggttgatggtgggtttggctgatggtggaattggctggtagattggttgatgatgggttggttgatggcaaggttggttcatggtcggtttggttgatgttcaggttggttgatggtgaagttggttgatgatgggttggttgttggtaaggtcagttgatggtggagttggttgatgatgggttggttgatgttaaggttggttgatggtggagttggtttatagtcagattagctgatgatgcattgtttgaacgtaaggttggttgatggtaggcttggttaatggtaaggttgattgatgatgggttggttgatggtgggttgattgataatgggttggttgatggcatggttggttggcgataaggttgatcgataatatggttggaaggcttaaggcataagtgggtaggtgtgggtctggggctagggctagactcccatttgtcagaaactcccagtagaatgggtggccaagaacggagattaagatgttttagagagttggctgaccaactgcagcccagtgtgcagcgaactctcatgtcagcccactggaacctcactgcatttgcaaatagatgagctaaagctttattttctcaatttaaaagatattaatcagtgatgtagatttaggaaatctgtctgttgaatcagtggcagagtcagatgggtagatgtgagggctctttctcccctgacgccttcagcaaatacctctggttaccattgttcccagtactgctcactgctgttcttagagctgcgagatgaggtaggaaaagcttccctaatgcatcctcagggcttcccgtgtccctgggggagagacgatgccccatgaaatgcagctatggtgtccgagagtgatatgcatccctctggtgggacatgagatgacttgggtagagcagagatgatcaggggtggggaggagccagggctttgtggggtggagacctgtgtggggtgcatctcttggggggcttcccagggcagtgggccaggcaggcttttggacaccactgctttctttcctttactagcagtgtttccactgatttttcttcttttctttcttttattttttttctttttctttctttctttttttttttttttttttttttttttgagatggagtctggctctgtcgcccaggctggagtgcaagtggcacgatttcggctcactgcaaccttcacctcccgggttcaagtgattctcctgcctcagcctcctgagtagctgggattacaggtgtgggccatcatgtctggctaatttttgtatttttaggagagacgggatttcaccatgttggccagactggtctcaaactcctcgcctcaggtgatctgcccgcctcggcctcccagagtgattacaggcgtgagccactgtgtctggcctccattggtttttaactgaattcagtttggtaactgctgaagagctggacgttcgtttccaagaaccattccctctgctgaggcccaaaactcttgtaactgacccttacttccatctctaggcagagatcagtgtgagagacaagacttttcagttgtcttagaaagattgcatatccagtataatgtcagtgtgtcctgtatttggttttattcttagtttctgaaacatctcacttcctctaaaacagcacttcttaaaccacatctctattgctgtcattgggtctcttcccttcctcctccaaagagtttaagagatgccaagttgaacatagctgaacaggggggtttattttacctgcagaatcctcagaactcttaagtggctttatattcatccaaaaagtcttttaaggggtgcagagaatggagctttttccaaacttatctgaaagcagaaacatcatttcatggacaatttgctaataatgtcatgcggaaactggagtgtcacacacttagcgtggggaatgtggcctagaaactgagttcccttcacccaccgcggctatgcgattaatgggagtagctcttggcccgtcggtctgcaggtggagatgtttgtttccattgccgagaatgctgcggtgggaatgcactggcagcacccgcctgttgaggaacttgttttgccaaacatactcggcaggtgactgatgagtgcctacccctcccacaaggccccttctgctggcagaagatgcctgtgacctcagctcccacctggtggagcagagatgggcagcactgggcagcctcgggcccccgggaggcccctgttcgcccacagcgtcccaggtgccctgggtgttgccaggcagcgatagggagtgggctctgggcagagtcggtgtgagttcaccaaagtctccaccttgagttcctcaagcccagtgcaggagagcccatgagggtcaggggaagccaagatggaggcacacacccaggggacatcgtggcacctgctgcagggaagcccacgggcatggctgtgattcccaggggtcagaggtcaacagcctgaaggtcttctcaaatatgggaggccaggcccaggagttgaaggaaaaaggtttatccatgggagaaggagtagtggggctctcctacccctaactgcatgattctgcaataaccagaaacaagaacaagaaaccgcagccattctcctgaggggacgggggccccatttcttcaaagttccctctcatcctcagggatactgatgggctcccctgtgactgcccctcctctctccctggggcatcatgaacctggaagggggattcttccgtctccctggccctggccacgcagtgcccacctttcccgtgatagccacaacgtccgtggagagggaagtccagcccctgggaaattggaagttgtgcgcaggtccttgcctgctgaggcctgagccggcgttcagcacaggtggctctgcccagccctcagcctctctgccttgtccctgagccggagagcacaaaagggcccctccaggggaaatgctgctggtgtcatggcaacagctgtttcactcctgaagggggccaggccaaggccctgccttctgcaagcactggttctcagagaagataccagggcctgcagggtgaaaatgagctcctgctaaaatgggaggcacaggctgtggcgtccaggctgcccctaccccagccccacgcacccaggaatctagcacgtctgtagcccctcgggcgtgagcccactccgctgtgaatcacagttgaaggcggtgcttgctgagtgttcgggcttcccatggccccctggccccaggttgctccccgtggtccagtgcactacctgcctcaccctgagctggggccccctgggcctgcggcatctcctccctcattgccaacagctccttacacactcagagtggcctccttttgttcctttgtcctggtgatcggggagaaggcatttagactccccctacccgcatgccacaggaggaagctggaggcaggcgtctcggaggacggggggacgtgggtctggggtctggggcctcagtgccggacagggacagcatgatgcaggcttcaggcttcagctgggcctctgacaagagccatgggccacaggaggaagcacgtggcgccctcctgcacgtgagcagctgggaggctgcccttccaggcctgtggcttaggagcccggagcctcctggagcgcagggtcacatgtgtctgagcttgaggccccgacttcagaaccgagggggcgccgtctggattgtgcggtcggtgaactgcggcttcggttctatcctttgtggccctgcagccgcttaatccccaggtgtgttctgttctgcctcattcccacaaggtgttgggacccagcagacacgggtgctggcgatcaccaccgtgtccatttagagagctttcctgaggcccacagtgtgcaggcggcagccattgtgcggggactgggagggttgtggcctcaggcgggggcggtagccagctcttccctagcactactttgtgcggggactgggagggtcgtggcctcaggccggggcggtaaccagctcttccctagctgctccagcactttatgtttgtaaattcatggagtccttgcggccactgtgggaatggagaggggtcattattttcatttcacagccgagtgtcacatggcccagattgtcagccaggacgtggcccagctgggacttgaacccgggaggtctggctctggggctgactgttagtctgcagccctgtgtattgcagtgtagacaggaggctcagcgcctgcccgggccaggcagccacagtctggagactgtggctgagggagcctcagtgttctgtagggcacctcggggcaccggacatgcacgcacagaaccagggctgcaaccccagcaccggcctctgtcggtggcagcaacagacatttgggctgggaggcaggcttggtggtcagcaccacactcacaggggaccagctgtgcacccacctgggccctctgcagcttcaggctccgatggggtgcctgggcctgctgctgacgcctctgctctgctccccgcagcttgcacgcggacaccaggtggcgctgtcgtctatcagctatgtgggctgctccctctccgtgctctgcctggtggccacgctggtcaccttcgccgtgctgtcgtgagtccccttttctaatccacccaacagtctctcggcccctgcctgcacccagatctcaagatggaagagacacgggagaggggaggggctgtggaggtaagagcaccaggcttagctggaaaggtctggaaaggcccccagcccaggcacaggaattctggtggaacccgagccaggcaaaaggggatggccatgggcctggggacacctcagccctgtgctcagatattcactctcgctcccacgttcctcagcacaggcgtgtggtcggctttgagggcccgactgtgcccaagagagatgagaacatgcttggatgggggctggacaataaccaagtaaacaaaagcgagaacaaacatcttcactgtgatcacgccacgaggcagcagggcagagagcgaggggtgcagctaggtcccagcagtggtcaggaagcttacgctgagggagacatttgggccgccatgcggggacctgggagagggtttactgcatgggaacagctatgcaaaggccccacagctggaataagctggggctttgagaagcaggaacatgagctgggaaagaaaggaactcagagcagagccatggcccagggtcagactgtgtagggctgtgtgggcatggaaggagctggggtcagatccaagagcaatagggagccatcgatggtccacagcagggagtgacagcaacccctctggctgctcttggaggaatggatatagggacttcgtggggccagggagcccagcctgggggactgggtcggcgcagggcccaggcctcacaccctgcctctgtcctcagctccgtgagcaccatccggaaccagcgctaccacatccacgccaacctgtccttcgccgtgctggtggcccaggtcctgctgctcattagtttccgcctcgagccgggcacggtgagtgggcgcagctccgtgttcctgcgctgtccttcccttgcctcctcggatgtcaccgggtggcaccttctgctagctttttcaactcaaatttcagaacccatctccccagacaaccagggctgtggttttctcgggggaagcagagatcgtgacgtgcatgagctggtttctgtgctgcacgccagcctcgggtaaagctgccgctgccgccacccactcacactgcctagcaccagctacgcgcgaggcaccatgacaagggcttgcatctgtgaagccatgtcaccctctaaccagctgtcatcctctcagcctacagataaaggaattggggcacagggctcacagtccttggccaagctgacggcctggtgtgggcagaccaagactcttattggctgcaggctgtgcccttcatcagctgcttgacagcaaacagttgtgccacctctgttcagcgaagcagacctgcagacctagatgccatctttccctgccctttgcatggagtggggggttctctggggccctaagaagtcttagacctcacagaaggcaaagagctgagactctctgaagtgacccagcagtggaatgatgtgggcttgtaagctagttgatggaagagaaaaacagagggctgcctgctccatgtgtgggaggaaaaagggagctggttctggcagaagctcttaggaacccagcaggataagcctgtggtcttagggtgcaatcaggattggccaacagaagatgaacgctttatcccatgcctagcgggtcagcagagcctctcctcctcactgcccagcagagccctttgtccccatgcatgtcctggggctgctgcctatggacagacccaccttcatgtggcagcaagcacctccctcacagggcaccccacctcagactcgggagcatctgagaagttcctggatgcaccgtggaatggatggggtgtgcactggcctcatgttctcctgctggacgcttctcaggctccggtgtgaaacctcccatgaggattccttacagtgcagattttggtttaggagctctgggtggagctcagaatgctgtatttctatcaatcattcaggtgatgctgacgctgcctgttcaagtccatactggggagcaaggtcccactgtgtgctggcagcaggaggggaggcaggtctgcagcagctccaggtgtctataatcccagctggtggccctaggggactgggagagcatctttcctccagaaccctgtgtctcaatcccagggaagggctctgatgggtcccgctttcccagagacctgtgtctgaatcccagggaagggctctgatgggtcccgctctcccagagacctgtgtctgaatcccagggaagggctctgatgggtcctgctttcccagagacctgtgtctgaatcccagcgaagggctctgatgggtcccgctctcccagagacctgtggctaaatcccagggaagggctctgatgggtcccgctctcccagagacccgtgtctaaatcgcagggaagggctctgatgggtcctgctctcccagagacccgtgtctaaatcccagggaagggctctgatgggtcccgctctcccagagacccgtgtctgaatcccagggaagggctctgatgggtcccgctctcccagagacctgggtcagaatcccagggaagggctccagttggtcctgtttgagtgatatgcctacagggtaaacctttgtgcccagatgggagaggatgattgtaatggttggtcccaccagagcctctggggtaggaaggggctgctccccaaggaaaaggggcagctggtcctggaagacacagggccaggggttgctgagccaacaaaaataataggtatgtcttattttgtatctagatataacagatcatgatgacaagaaacacatttagtggcttgtacatttcttctctgagaactaactgccttgggcgtatctgaaggacagaacttggagcgccagcagagctgggttgtcctggggtccttggtttgtgttccttcctgggctctggtttcctggaccttttatctagagctaagggacacgccctggctgttcccagcacctggactcacagggagcagaggagtggagccccaggaggatctgaggctgcactgtgcagggcccaactctctccgtcctgggcacctggggcctccaggccccaggcaaggaatggagaggttcccaaggccctgcctttctgtccctgagccctattgaggggaagcctatggagcagcatggtcgcctgagcccctttcagttctgggtaactacaacttggaagctgcagtcaatttagttagaactagaagtcccagcatgtagggttcagccacatggcaggcggcaggctccacacctctctgggagccacgtggcttccaaagttccttgctccagtcctcacttgaagggagggaaactcttccatagtccctgccttagccccagaatccaccctgattggaccaggtgagtcatgtgcccatccctgagccaatcctgttgcaaggaatggatagttttgctgattggttgggcctgagtcctgtgccctctcctgaaccaatcaccatccctgggggcaacatggtgctgtaattggctagccctgagtcaagcgctacacccaaatccctgggcttgagcaacaggaagataccctgggaagaaacatggtcacatgaccaaaagaccacccaggacatggatactgggaggctgggatcatagccacgcccagggcccaccccagagctgtctcacttcccatctctggttaaatcctagaccccctgccaagtgatggccgtgctcctacactacttcttcctgagtgccttcgcatggatgctggtggaggggctgcacctctacagcatggtgatcaaggtctttgggtcggaggacagcaagcaccgttactactatgggatgggatggggtaggtggggcagggcaggtgggatggcggggcgggagggacaggaagagacaggtggggatggggcaggtaggacaggatgagacaggtggaagtggggacagaaggggcaggtggggatggggggaggtgggaatggggtttgatcggatgggacagggaaagtcagatgtgctttcatcttcatattatccttcttggtgcctcctagagacccaaataggaaggagaatccactggctaatcaaaggcaaaaagtccccatcacttggaaacatttccaacattcctgacttggtttatcaattttggtgatcttttcaaagaaccaacttttggtttgattttcttttttgtttttctattatccgtttctttaatttctgcttcaatcttcattatttcctttcttttgcttattttagctttagtttcttcttcttttccagtgtgtcgaagtgaaagttgaggttactgagttgagattttcttttttaatataggcatgtatagttatatatttccctctactcactgctttagctgcatcctgtatgttttgtgtcttcattttaaattcatctcaaagtattttcaaatttatttaatttttatttgacccattgattatttatgttgtttaatttgtacatattcatgagtttctcacttttttctattattgatgtctaattttatttcattgtggaaagacaacatattttgtatgacttcagtccttttaactgtattagggtttgttttatgccttagtaagtatctatcctggaaagtgttccatatgcccttgagaagaatgtatattctgctgttggatggagtggtctacagatacctgttaggcctaagttggtttatagtgttgttcaagtcttctatttcatcgctgatcctttttctagttgttctgtccattactgaagtattgaagtcaccacttgttgtattgtgtatttctcccttcaatttgttgatgttgtttcctgttgcttggggttctgtttatacttacatctttctgatgagttgacccttttacatttataaaacatctcttcatctctagtattatgttttgttttaaagtctgttcgtcccatatgattagtagactcgctccagctttcttgcagttgctgtttgcagagcatatatattttccatccttttactttccacttatttgtatctttgaacctaaggtatatctcctgtaaacagaatacaactggatttttaaaaaattgtctggcaatttctgccttttggctgggtcatttaatcctttcccatgtaatgttatgacacatagggtggattcacatcaacaatttttctctttgttttctatatgtctactatctgttttgtttctctattcttcctttacttctttcttttgaattaagtgaatatttcctagtgtaacactttaattctcttaatgatttttttcactttttttttttggttattttcttagcgattgacctaatgcttactatatacatcttagcatattagaatctattccaaatttatactaaattataagatataaacattatttttatataggcatattctcttttcctttgttctctgattattgctatacatgttacatctgtataaggcacaattcaataatacatttttgtaactatttctttaatcttgtatcttttaaagaagctgggataaaaggagagcaagtacatatttatagagttacattaaccttctgatttccatttctggttctctgtattttttcctgtgaatttgagtttccatctggtggtgttgcttgctatgtgtatgtatgtttctgtgtgtgttaagattactttttggggtcatttgctttcagcctggagaactttctttgttatttcttgtaaggcatgtctgctagcaacagattcatttgttgtttatctggaaatccctttatttcaccttcatttttaaaaagtagtttttctagatataagattcttttttgcttttcgttctttgattatgtcatctcactgccttctggctcgattgtttctcataataagtcaaaacttaatcttactggggtcccttgtatttgaagaattgtttttctgttgattctttgaggactttctctttgtctttcagcattttaactctgatgtgtctgggtgtgtatctcattgtgtttactttttttttttctttttgagacagggtttcaatcacccaggctggagtgcagtggcaccatctcggctcactgcaacctccacctcccagcctcaagtgatgcttccacctcaccctcttgagtagctgggaccacaggtacaggccaccatgcctggctaatttttgtatttttgtagagacagagtttctccatgttgtccaggctggtcctgaacttttgggcacaagcagtccgcccacttcagcctcccaaagggctgggattacaggcgtgagccaccatgcctggcccactttttggtgtttattgagcttcttagatgtgtagattaattctctttatcaaatttgggaacatttcagccattatttattgaaatactttttatgttcctttctctatctcctgtctttctaatattcccattatgagtaggttggtgtgcttaatggtgttccacatttagagtacacttacagtacagcttctaagactcttgatttttcttcattgttttttttttctttgttcttcaaattgcgtaatctttctttatctctcttcaagttcactgattcttctgccactttggatctattttggaacccctctagtggatttttaaaatttcagttattatacttttcgactccagaattttcatttggctctttttttagaattttgatctctttgttgctattctgtgtttgatgagacagggtcgttatgcattcctttactttttcaatgacagtttcatttagttctttgaacatatttatagtgattgttttgaagtctctttttttttgataaatacgacaactgagccttctcacaggcagtttccattgcctggatttttccccatgtgtgtgtcacactttctggtttctttgtatatctcatagttttttgttgaagacttgtcatcttagatgacacattgtagccacccttgattctgattccctccttccatggcttctccttgcttgcttatttatttgtttagtaacttggctggactatttagcacagtctgtttctcctgtggtgtgattcctctgacatcactccccagagggcagtcttaggcatgtacagtcaccctgggatggcagtggttttagcagggctctctctgtctctttccatggcctctctctcaagctctctacttatgtttgtatgacaccatctgttaggttccactcattgccagcctatggctctgttgttcccaacaatagcttggggcacatgatgctctacagcttgatctgattaaatccaggccccttcgtaggggtatttttgaggccagtctttgaggtttgttctgaccccaggaaggctcttctgagctgtctcttccctggctgtctccagtaaaccagccggaatatggtttatcttggtgttgtcgcggagccaccagcttcctcttcgttccctgctgcaaagctccgttctttcccagactaccttaggcttgaacttctccactctgctttaaatcagttcccatggggagcactttggagttctctaacctaatgggtagcttcttttcctgggaagaattcctgaggcactgctctggagctgcaggcaaggacagtggcccactttttgtggagtgacatgtctgcctctcatgcagggcactgggtgggggaaatcgcttcgaatcttcagagcttgtctctcccagtgtagaacctctgcccaatgagtcaacagagatgagggcagtgaggccccagtgttctgagcctgccacaccctgcatactatgagttggaggaggaagggagtcccaacctttcagctgcttttatctggagtagagcttctaaagcacaaagttggggggaatgagaaatgcgggcagccttccccacctcccccagcctggggagataccgtagccctggactgggagctggagggagtggagccctgtcttcttgcccacacctacttggagcagagcctctctcacaccaagctgggcagggaagcaggttttggctgaagtgccacagactcagtcttcttaacaagatttagtagattttcttgagccagtttttctcaatttgctgtaaacccttaggaaaatgtacagagactttaaatgattatgttttttaaaacttttttttttcagtgatagctgtctctggggaggggtctgctgagcgacttgtgctgtcattctagaagtcagctccccagtgatgtggcttctttgctgagctttgcccttgcccatcccaaggggtcccagtgagcactggaggctctaggttgggctgtgcattgacacttagcattctcgcagttgttgtaaaacactgaccagacatgagggacctgctacttgtttcaaatacgtttaattttcacagtctttgttatgcaagtagcaggtaaacaggcttactttgtgctttgagttggcaaatgtaatttatctgaggattaagtggaggtaaattgtgctcccctcgtggctccctggggagactgaagaggccacttgggcagccacctccagactgcggctggtcatgcagggagctccccgagtcaccacggacgtcctccgtcctgcctcactgctcatgctgtatcatcacgaggatgcttttgcacacgctggtcctgaggcccgtgtcctctgccctccctccaggtcacgcatgacctgcttcttcaggcctctgtgacgccccagagaggagagctgctccttctgatgatatctgacctcatcagggaggatttagaggctgactgatggccaactatctagagtttattatagtttctttatggatacagtcatgtaatttagaggcatacgtgcatgtgtgcacgcacacacacgcacacacactcacactctccataagccacagaaaagacagctgggtgaacgaaaagtgtctgcaggatttgttgctagagtgagagcaatgtatgtagcggggctgtctgtgtcgccgataggatggggttggggtgtgtgtgtttgacagacagagaatctaagccaaaccaatccagcctggaaggatgttttatttgatctgcacaatgctggagggaaaaaatgaattatttgccaatattttaagattgagggattttacacaagattacaaagttcttttgaaaaatgaggagatccgacgccctgagtttatattcctccttgacaacagtggccagaactgtgtggtttctgataccaatgcagccccagtaggagactgagcttgtagtccctgacacagctcttgcaaatggagcgctggctggttctgtgagtcctgcaacctccatctatctccctgtcagctttcccttaattaatttcatcaggagcccaagaactgtgtctttcattccaaatggattggagctggctacaagctgaagtcgggggggtctgcaggcagttgggctctctcgaccttcagtttttaattaaggagctggaggcccacccagagcatggtggggggagcccctgggaggtggcttcttcctgcagatttcatcctggccttactctagtttttgagcaatattattttttggaaactgaggtggggtgggggggcatcaaatccacaccttaccttaaggtgttgttgactgcgagacttgtgctaggaactctgaagggagggacagataacctctgtcctcaaggagcccacaaggtagccaggagggcagagtgacaagcattggagagtttacacatcactgaagcagacaagaaactctgattgcaaactcagaggtgaagagaatgtaactcgttttatttttctttattgcaacttagtttcttttgtgagctcctgttcctctagggacaaaacttaatcttagttccaggccccccctttctctgaagctgcactttcattccagagagattgcgtaatgccatgatcacaggagggggatccgtcagggtaggcgggcaaggctgcaataacaaacagcttccatccctctttggttttaaagaacaaacgtcattttcctatgcacgctacatgtccatggtggcccgtggtggtggacagtgaagagcccaggctgacggagaaggcaccgcctcgagctatgtgagggaaggggtcagagaggacactgcactggaaatcatgtgctcagcccataagacacatgtcccttctgtacacaactcagtgcccagaaccagccccgtggcctcaagagccccgaggggcaggggtgtggacctcccctgtgcccgcgtgtggggcatctggaaataggtggcaccagtgacttccacagttccctggtattgtctccctccaccccatctgtcgagaccccttgcccatgcgcccatcctcccaggccttcgcttcacccacctcggttaatctctcataacccatgctcctcacctgcccctcaatcttagggggcagatgccaaggacagcaccggtctggtccctctgaaggtcaccgtgttgcaaagaggagcacccaaagtaaatgtctctgatgacagggccagagggacttcacattgtccgcagaagcatgttccaggtctgcccaggttaccgtgtgagagtttcagatgacagcagtggtgggaaaggggtgaggtctgagctggttgatgatacagattattgcaagatcagcttcatcatcgaggggctcatcattcatagacagctcatgtcatcctcacagcctagtgaggaaggcaactcattacgttcccatggtctgagcacagaatttcggctggttccttgtagatgcacagctggtcccgggcagccccaggaatagaacgaggtgtcttctggccccaaagcccacgctcttcccactcactgtcttctccatcttactgcccctctccttatcctcccacttaggaatgttttcttcttaaaaagccccacaaacgcactcacccagacttcatagctcctgcagctcattttggagaaagcagacagtgggccccaccctgttctcagaccctttgtccttacccatggcttggcctctgctggacacaggggtagatgcaggggaagaaatggcagaggagctcacatagggaaactcaaagtgacaggatgacaaaggcccacagtcactgctgggccccaactgtgcgcctcttccacagaggctgcctggtctccttctggacaactttattgcccagacattctgcaatgcatttaagtccttttgacatttaaaaccaagtatttcagagacaagactgtccaggaaatgtctttccagggtaattaacttgaaacccaaaccctgatgtttggaagggcaggcacggcgtgtactctgcccccagagggcactggagggctgcggcctggaggcggtcgggtgggtgccaggagccaccttccctcctcctccttcctctggagcagaaatctcccagaacctgtgtgacttcagctacggaggcagagagccacatgctcttcgtgcacttccatcccccaccctgctatcccagggatccgagatgtgccaggagctgtgtctcttgagcatcctcctggggaaaaggttcaggtgtggagtaaggagctggtcctttgcagtctctcatctctctcccatccttccctgcagagggagcagaggacagaggctgctgtgctcagggtggctgcactagagcaggccccgtggatgatgccccactttctgaataacgagaagtgtgttcttttcagaaacagattcccattcgtgcaggatctgtttcaaagctcacacgtgcgtgtggaagcagagccatgtttccagacaaattccgtggatggctgagcttgaggagtgttgcaatgcgatcttccttttggagagtcataagacacattagcatacaaaacctctgcactttaaaagtgaaagtagaggccagttcagatttgggttaggtcaattcctacaagtagtgtggccatagagtgttttcgttgcagaatgatgaagctctggggactgctgtgatccagatgctttctacctcattcgtgggcctcccttctatcaccacccccaaagtctcacttggctttgtcaaatattaaacacatttaatttgtcacactcagtttcaagtaatagaaatccaacttgaactggctaaggcaaaaagggaatgtgatggctcatataacaaaaaagttctaagatgctggacttcagatatggcttgatccatgagcttaagtaatataatcaagattttgttttctttttccgtctctcagatctgatctcttgtggtgccaaaatggctgcctggaccccaagctcactgacatccttatcctcttaggggctccgtagaaaagagagtttcttctcagcagtttcgaagaaagcccttgattgagtctcattgggccagccagggtcacatgcccatctttgaaccaatagctgtggctgggggatttgatgttccagtcagccagtcctgggtcacatgcctcagagccaggaaggaaccagcccacctggacctcatggaaagatggagtgtgataggttccctaaggaaattatgggctcaaatactgtaagaatgtggactgtgtgcatggcaaagtcagccatgtccgatgtcccctcagtcccagctgatctcacacctttccaccgccgctctagaacagggcttctcaaccaacactatggatacttgggctgggtgactcttgtggggcagtcttgtgcattgtagggtgtttaacagaagccctggcctctgcctgcctgattccatcccgttatgacaaccctagatgacttaagccattgccagttgtctcttgtggggccaccttggccctggttgagaaccacaggtctagatagaccaagctgagcttaccttcctgccagtcacaatgccacatctcacccacatggtttgttttgatgaagactcatacactttgttgtctagtacagaagtgtgaacatgtgagtatgagtgtgtgtgtgttattcctttgtttagactaaaagttctttgaggataggggctgttctgtgtcccaacaattagcacatagttccccctctgtatacatgtatgaggtgtacaaggaatgaagaaaggaagggagggatgggggaggcgggagggagggaagaaaactggagcaagtgaacatgatattctccaatcttctgcaggttttcctcttctgatctgcatcatttcactgtcatttgccatggacagttacggaacaagcaacaagtaagtgcagggctttgccttgcttttggcaggcgttccatggaacagcttgtggcgagagccccgtggctcttgccttcctgtgctcttctgggtgcaggggtgctgtgcaaagctggctcccacaggcccagccggtgagaaagtcgtggtccagggagagggagaaacaacccagctgtgctctggacattttggggcctcggaactagcaacaaagaccacagagcgcctccaggaatagcagggggcctgctaggagtttctgcttggaaatgtttcacccacgtggtcttctcagacacagttctggtcatccacggaggctgaattgtggccctttcaccctttcttggggtggccagcaagcgcactgtgcagaccgtgtgcccagtaactcacagggagcagacacatgcatgttggagtaagtggggcctgctgtgcaccaggcaggtggtcttgagggtcccattgcttgggtagtaggggatggaccttatgatgtccagtatctcctgttgccacttgaaatgcagctcatgggtccacagttgtgtcaggaagaggatgggatggtgctgagggaccagatcagctgttcacgttccagaaagatgattttctttccttacaagtaaaagagctttcactcaaatgtttcttggaagctgctacctgtcctagccacgctgagaaaccactgagtgaaaacatggaaaataaatattgacggtgcttacaaacagaaaggaagttgagcattttcacagcttcagaatgagataatagtacagacgaatagtgaaactgggagaaatccagccttttccacgttggtgcaggttccctgaaggcgaagcatttgtagaaggcagtgtctgagcgcacagtgaaacaagcatggttacgcagaccactgttctggccttcctttcattctggatgctgttagaagttgagggactaattagaagaagaatgttctcctcaaacacagctcaatggcatttgttcccttttatcccatctggagcttggggatgctggacccacagtcctgagtcccggggtctgaccgtaatacaagccttttcccacactcatgcccgaaagccaggcagcaccagccaggttcaggaagctcaccaggtttctgaacaggatagagtatctaccagaagcccctcgtcgacttaaaattctgcatgaagtgctggaaagcacaatctctctctttgcagaagcatcctactctccggagagcctggtttgaatcgcacctttgcagaggtaccattcagacttgcagtgcattttccttttaaacagtgcatcctcagatgagaggtttctcctctccgtgctctgggtgtgcagccatgaatgagcctcttgcaggtgctgtctcttgttttggggcatttgccatctcctggtccgggaggctttggggaggaatgggggcagggaggcagtgtgctgacagtgatctctgaagtcacctgagctatttagggctcagattcctcatctgcaggattggagtgatcatagcgcccacctcaggggcagcataggattaaatgagatgatggagtttgttgtgctgtggggcagacctgctgctcagtgagcagtcacggagggatgaaataagccagccccggggagacaccacattgggtgccagtgaggactgcgccacgcacctgcccagatccaattaaaggcactccaggtccttgggaaacagtgtccaggagtcaagatgagaggtcctagggactcttcggctcttgacagtgccgtaggctctggagataaaattgtggaggagctggcttttttttgcccgagttcttggggtcacttctcagaggccagatcctcaaactggaccctcctctcaggacatcagagcaatcactaggaccctctggaacctttcctctcagttggagggcacggagagaggggaactgacctcgagctttgggcatatgggaatggtcaggtgctgcatcgctgacgactcatcaggatgggaatccctcacagaaggcccctattgggtcatacttgaagtgctctgcaggaaagccagtccccagcaaaggtctatttcctaatgaaattgaaatctattctggattttggctaaactctccagaggttgctgtcctggtcttcaaacctggaaaatcctttccaagaatgagacgtgggatcatcatggataaaaatacatttgcagggattaggaatgttgtatgactgccccaggtggaccctgtagctgagaaagacatcaccttagcaactacttttggatgaaggtacgctggcaggtggaacgaggttgttgaagtaacggctctgcttccctccgcagttgctggctgtcgttggcgagtggcgccatctgggcctttgtagcccctgccctgtttgtcatcgtggtacgtttcctacccttgtgggcgcagagcggggctggggaggggcaggaggagagggtgtggggctctggagatggcggggggctccctgaggagcttccgaaggatgcagcgtcgttcctcggtcactcctcgctagggctcctctgggccagtgactgagggtcttatttcccggaatgctcaggaaggcggtgctttccaggcgggtccactcgaggccccagggctcttccagtcgaggcggcaggtgcaggcacacagccctgagaacagcacaggcgcgggctcgtccttccccatcctccggtgccttctcacccaccggctagctccttgctcaggagtcaccaggactccaaggctgcagaggggaatctcagcagaagcctcctgggaaccacacataacagttacagttacagtggtttgcaagtgacagaaaacccaactcagagttttttgttgttgtttttgttattgtttttttgagacggagtctcactttgtctcccaggctggagtgcagtggtgcgatctcactgcaacctctgcctcctgggttcaggcgattctcctgcctcactctcccaagtagctgggattacagccatgcgccaccacgcccagctaattttgtatttttagtagagacggggtttcaccgtgttggccaggctggtctcgaactcctgacctcaggtgatctgccctcctctgtctcccaaagtgctgggattacaggcgtgagccactgtgcctggccccaactcagtgtttaaacacggatggggatttacaggttcctgagtcaggaccatctgtggggaggctgggcccagggctcctgcacctgcactggcatgaggctcgtccctcatcttctctgcctccccggatggaaacggaggctttttcccagcactcccatcgcaagtcccaggctggttctcattggctgcggtgagtcatgtgtccgtcccagaaccaatcagggaaatgggatggagtcgaatgttggtcagggctgcctcccatgatttctttgtgcagttagcaccggtggacaccaggagctgctggtatggtggggtcgtgatcagagggtgtgacctcagcagagtctgtgctttcccttcggtacttccacgtgcctgtctctgagggccctggctggttgggcccgggctgcgcgtcctggcccaggcttcccgtctgcaggctgggtcagggccccgcagtgaactggagcagctccctggactgaggggcgtcaggggcccaggggtgttgcgcggggcgccacgagccgagggcagggatctttgtgcaagcagaggtggtcgcgagggaaaggcttgtggcatcagagcctccctcacagcgtctacagagctccgagcagggctggtttttctttcagtgaatcgctgtcagctgcagaggggacgcctttggggctgcgcgcttgagctcttagggtctgggggccgcagcgcctccccggggctgcgtgaggatcacctgccatcgctttaccgactctaccctttaaagagtgtcagaggcttcagggagaggtccccgcgctctctgggggtctgggaggaccattcattttgccaaccaacatgcaaaaacgctttcagagcggactccagtcatcaaactcctggccggagcatggccagttgggaggggctttaaaggacgtttagtgacagagggtgggaagggtaagttgtattcaagtctctgctgttccttgttctccctttctctctactgacttaaaccctctagaaccgcagggcctgggcagaacaggcccctgtgtcagacactgtcctggtcatctggctttcatgtctgaccgtggtcagtgacagctggggttccgaggtggctctgcctggctccttcaccacccacacggcgtggggccgagcgccaggaacccagcacccctgtgtctcccagcttcactagagtcccttttgtcattcctgaggggacattaccttcagggccccaccccctaccccactccttgttgtcagtggccatcattcctggaggacagaatgagccctcaaactcattacataattgaattacctggggagttttttttttttttttttttttttttttttttttgcgacagagtcttcgctctgtcgcccaggctggagtgcagtggcacgatcttggcttactgcaacctctgcttcccaggttcaagcaattctcttgcctcagctgggactacaggcaggtgccaccaagcccagctaatttttgtatttttagtagaaacagggtttcaccatgttggccaggctggtctctaactcctgacctcaggtgatccacccgcctcggcctcccaaagtgctgggactgcaggcgtgagccactgcgcccggccctgggaagctttaagagtattcctgtctaagctccacctcctgaagtttcggcttgttggcctttagaatcttccaggtgactctcagcacagctggcttgaggtcctcatgccctcttgggacattggtagcaacaggcagattggaagggaggcaagagctgaatggggcagccttaaaagattccaggttcaggctgggcgcggtggctcacgcctgtaatcccagcactttgggaggccaaggcaggcggatcatgaggtcaggagatcgagaccatcctggctaacacagtgaaaccccgcctctactaaaaatacaaaaaaattagctgggcgtggtggcgggtgcctgtagtcccagctactcgggaggctgaggcaggaaaatggcgtgaacccgggaggcgggtcttgcagtgagccgagattgcgccactgcactccatccagcctgggcaacagagtgagactccgtctcaaaaaaaaaaaaaaaaggttccaggttcaagtgcagaggccagcaaactgcagcagtgtggcccactacctgcttttgtagatcgagttttcttggcacacagccacgtccattgatttgcacattgtctgtggctgctttcaggctaaaacagctgagccgaatagttgcaacaaagactgcgtggcccgcaaagccaaaaatactaactggctcttggcagaaggcatatcaacctctgggccagggggtgccgtggaggttccagcctacccctgcggggagtgccgtggaggggagttgggggtcttgtccctctcacgtcttcagaggatcccagggtttgtgccatctgggccaattcctcatttacccacaagtcatcagccttatttccagatgaagaaagcaggttttgggataacaagtatagcatgaccccatttgtttaaaaagttaaaagctctatatgggtacacacccacatgtgaacatataactgaataagaaaatgcccagacagatgcacacaaaataatggttccctaaggagaggtttgggtttggggagtatgtgcttcaagattatatgcacctaaaaacacccatgtattgcctgcataatttgaaaattaaaaacttttaggaagctgtgtgtttacattagaacatcagcttccctgtgtcctggcaaggttcatcctgaaaaggcaagaatttgggagacagtaaagggtcactgtggggcctgctgggcctagggttgaggagaaaagggcagagcctagccacttccagtaacaccccccaccaggcgtctacagccaaacacacacactgcccaccgccccttctcgaattgttctcggctgtaacacacacactgcccaccgccccttctcgaattgttctcggctctaacacacactgcccactgccccttctcgaattgttcttggctataaggcagggaaatggcttttcattcactcggtgattctagttacacaaaatgcgaacatggccataggcccgttattccctggtgtcttagtctatagggctgctgtaacacgggaccacaggctgcacagcttaaacaaatttattttctcacagttttggaagccagaagtccaagatcgaggtgtcgtcagggttggttctcccgaggcctctctccttagcttgtagataactgtcttttccctgtgtcctcacatgcttttccctctgtgcatgtctgcgtcttaatctcctcttaaaataagtgactgcctaagccagtcattggattaaagctcaccctagtgacctcgttttaacataattatgtctttaaagaacctgtctctaagtggtcttgttcttaggtacggaggcttagggcttcagcatatgaatttgaggggacatagttcagcccataacgcctgattttccagaagccacagagcctagacaccccgttcccccaaagaacagggactctggatgtcaggggcactttagcctgagccttcaaaatggcttgttctgtgctggccccaccgaggaaagaaggagagtgcctccaggtctggggaagagaaggagtctctgatttaaaatctttgtctcccttggggagaagccagggtagctatgtgtctacatagagacagagatatggttacagatatatatacagaggtatagatgcaaacagatacatagagacagatacacagatggaaatgtagatacagatataggcagatacatggatacagatacaaatacagagatagatacagatgcattgctatagatgcataggtacagataagcataaatatagatacagatatatacagatgctcctgaacttacaatgggattaagtcctgataaactcatcataagcagaaaataccataaattgaaaatgcatttaatacatataacctacagaacatcatagcctagcctacctcaaacattctcagaactcttacattagcctagagttgggcaaaatcatctaacacaaagcctctttataatgcaatgttgaatatcaaatgagttgaatactggaagtgaaaaactagttgtataggtttgcagagtacagtttgtactgacatgtcttgctttcacaccactgaaaaggtgaaaaattattactcgaaccttcctaagttaggaactgcctgtagatacatgtagatactgatacatagatacggatacctaaatacaggcagacagagacatactgctgtggtttgaatgtttccctcaaagttcatgtaacttaatttccagtgcgacaggttcggagaggtggaactttaggagctgattaggttgtgagggctttgctctcgtgaataagttaatgctgctgttgtgggagtggtttcattattgaacgagtgggtttctgatgaaaagatgagttttgcccccttctctctctctgtgctctcttgcttttccgacttctgctatgggacagtgtagcaagaagtcccttaccagatgcaggcccctcaactttggatttcccagtctcccaaactgtaataaatctctgttctttataaattacccagtctgtggtattctgttatagtagcagaaaacagactgaggcacccactgttgtgtaaactagctatttgtatgtgtgtatgtacctgtatagccctttcattgtgaaatagtggtgtccagctcagtgtttattcacaaatcaacattctggtgaccctgagctaggtcaagaaacagaacaccaggattcctatgcagtcctgcctccctcctcccaccagagatcaccgtgatcttggccttcatagtagccacgagacctttgctttacagttctactgcctccatgtgcattccagtttttcttctgcagtgaggcctgtgagttgtttctttgacatctgcctttagtggggagatgcttagctgctggaatatccatggtactcacactgtacatgcctcagtcccagggcattttccgatttgtagtcgagtgtgggtgtaccatacagcaaggcatggatgaggatgagtgaaatggagtgaggggggccaggcctgattctgtattatattttcatgaaatgtcagatttgtgccactcgcagccaaagtcccccaccgcaccgatgcaggattggaggccatggtgagccgctcctcctcttaggaagccacagcaaatgtatcatcctgataagatggaaaaaatgtgcctggaaaatgaaaccagactgacccaggctaaaagaaaaaaaaagacccagcaaaatctttggagaaaaaggaaagatgatgaattctgacaagtaataatgtgatcagcttaactgttatgaaacacttagagtgcatcttaacgcaaagcggtcaagataaagtaaaggacttgaaatctcaaattaatcactcgtagtgtttcatgttggcaaaacattttgctgcaagttgatcatcctttcggtggccttgtcagaaaagtctgggaacagtcatgtgtgcatctttcagctttacagctgagaggtccggggcagaaccacgctttatagcctccagaggcaaagcaggagtgatgatgagacctctgagctcatgtgggtgttggttgtgatgggaccctgagctcagatggggtgttggttgggttggttgtgatgggaccctgagctcaggtgaggtgttggttgggttggttgtgatgggaccctgagctcaggtggggtgttggttgggttggttgtgatgggaccctgagctcaggtggggtgttggttgggttggttgttatgggactctgagctcaggtgaggtgttgattgtgttggttgtgatgggactctgagctcaggtggggtgttggttgtgttggttgtggtgggattctgagctcaggtggggtgttggttgtgttggttgtgatgggaccctgagctcaggtgaggtgttggttgtgttggttgtgatgggattctgagctcaggtggggtgttggttgggttggttgtgatgggaccctgagctcaggtggggtgttggttgggttggttgtgatgggaccctgagctcaggtggggtgttggttgggttggttgtgatgggaccctgagctcaggtggggtgttggttgggttggttgtgatgggactctgagctcaggtggggtgttggttgggttggttgtgatgggactctgagctcaggtggggtgttggttgtgttggttgtgatgggattctgagctcaggtggggtgtttgactgtgttggttgtgatgggattctgagctcaggtggggtgttgattgtgttggttgtgatgggattctgagctcaggtggggtgttggttgggttggttgtgatgggaccctgagctcaggtggggtgttggttgggttggttgtgatgggaccctgagctcaggtggggtgttggttgatgggaactctgcactcactcaagttgctcgagatcctctccagcatctccaggcatccctctcatgggtcccaggcttcacggtttctccatcccctgaatcactggaacactgcatggctgagtttctattccacctgaccccaaggacactgctccgtcattcacaggaaatgggtttcatattatttccttttaatttataattgtttaaaactaaaatttaaagaatctgatttatgaaatggcaacacaaaatttacaggaaaagcttaagaatctatgcataaatgtgtctgcctatgtatgtttttgcattccctggtttccaccctccctccaaacaggcaacccgtgatgctggtttcatgggtatcctggggttttgtgcagatagggggactgtaactacatacccaccccatggcggccttcagtgtatgtggggtgtggcttcttcgccaaggaagagctgcctgagtctgtctcagacccacaaagtgttccatagagtgggtgtgggcagcagccctgccctgctgtctgggtgtggacggcagccccaccctgctgtctgggtgtgagtgacaggccggccctgctgtctgggtgtgagtgacagccccgccctgctgtctgggtgtgagtgacaggccggccctcctgtctgggtgtgagtggcagccccgccctgctgtctggtgtgagtgacaggcccgccctgctgtctggtgtgagtgacaggccggccctgctgtctgggtgtgagtgacagccccgccctgctgtctgggtgtgagtgacaggccggccctgctgtctgggtgtgagtgacaggcccgccctgctgtctgagtgtgagtgacaggcccgccctgctgtctggtgtgagtgacagccccgccctgctgtctgggtgtgagtgacaggcccgccctgctgtctgggtgtgagtgacaggccggccctcctgtctgggtgtgagtggcagccccgccctgctgtctgggtgtgagtgacaggcctgccctcctgtctgggtgtgagtgacaggctggccctcctgtctgggtgtgagtgacaggcccgccctgctgtctgggtgtgagtgacaggcccgccctgctgtctgggtgtgacaggcccgccctgctgtctgggtgtgagtgacagccccgccctgctgtctgggtgtgagtgacagccccgccctgctgtctcggtgtggacgttcaggttgtttccaatcttgttacagatgaggcccccgcctgtgtcagtgggtgaggtacccggaatagaaatccctcaagggaaaggggcaggagttgcagaatggcagagtcaggacctggggaaatctccactcccaaaacaaggaaagaactggaagaattgttttgaaaaaatagtcggaattctagaaacaaaggcatgcacactaaaagcatttattcaagaaaaacttctgaatctcagtaagagcaggcagggtctgtggcagtttgacttggggcaccttccatctccacctccctctctgtgtgatgctgtagccaccactggaggcacgaaagtgcttcccaggcagatggccaaggccagcctgccccgagggcatgggccgcactcacacatcagtgaccatcagccatctgcaattgaaatccccactcgaagtaataactgcacattagtcacgcgtttgtcactgtcctagttgaatcatcactgcatttgaaaaccactgacctgtcatccacgctgctcccgcttgctgctcctagttgagtgtggctttcttctcgtcgttacacagtgaggttggctggggggcatcagcgtttctggacatgctctttgtgcagacaccatgctgggtggctaatgtgttgacttcttttcccttccctggcctttggacacttctgttattagcctcactttacagatgggaaaataagggcaactaaggtgcatccgactgtcagctgagctgggcgtgagctgagcttccaggtgttgaggtggtcagtgaagacaggagccgaggagggaacagttggggtgctcactgccacaatagtgtcctaaggggctaggcaggagggggcggccccaccacgcaccactctctcccaaagaacagcaccaggagggtctgaagcctccgtgcagacagggccggtctcctgctgagagagccctgggcggagggctcctgctgattcatgggctcgggagctgcgcgaggaggaaggggaagggctcacagtggaaaagtcctgggcacagaaggtggcttcaaggcccctagggtgaggcgggctcagcagttgcttcagaaaggcctggcgcgggcacctaggcgaggggtgcaggtgtgcggaacagcgatgctggcccatcccgtgcgggggaagagcgaggccggcccatcccgtgcggggggagagcgaagctggccatcccgtgcggggccccagtggctgccctccgactgcagctcccttcagagactgccaggctctggccgcgcccaggctggcgtggggacagcagctgccctgtgaggccggcgaggtagagccctgttcattgcctgaaagttcgagcctgagagttcacacagaggactttatcctggaactggactccttgctgactctgtacacggcctcagaatttttcagacacaagggagaaggctaaccctcaccctaaccccgcagccagaggacactagggggttcttccccatgctgtgcctgcctcgccagcctcctactgagggagctgcccaggtgaggggcaggttgtgctgaagcctctgccggggcccctcagtgccccgcccagccccataggtcccaacaggagccttccagcagtttcccagcaaggaggggtgctggcaggagatgatgcccctctgccgcagcttctgtggctcgcacagccgcaggcctgggccggggcgggagatgagagccagctcctgtgccggggcctggcacattgagcagtcgtttgcacagtgggcactatccttctcatcacctggggcactgaggctccgaggacctgggtgagttgcccagggtcacactaacgaagcaaatgctaagatgaggtctggcccaggctcatgccctcatgcccggatgtgttcctgggactagaactcgtctctgctgtcttctcagtgcaggtgctctcagaggcaagcttgcatgttgtgtgtgttggtaaaagcccacggaacagggtgagatttgtcccagtgatgcccctgtgtcccaggagccctggctgggcaggggtagcctgtggtgagggcagtggccaggcggacgcagctctcctgcaggtgcagcccaggcccccctcaccttcctccatggtttcttgtgcaggtcaacattggcatcctcatcgctgtgaccagagtcatctcacagatcagcgccgacaactacaagatccatggagaccccagtgccttcaagtaagttgacctcaggctgccagcagtgccacggcccttctgcccccagaggatgctttgaggtcacaggagagatagccactcctgcctcctgtggccggcaccaaagtcctccacttgctccgtgtccctgccatctcagggcagctctggtttcacgccctcgcttggctctcgtgacccaggacagggcctttacccagccccagagctcccatgtgtagaagaacggagtctacggagttctcctagggatttcttcaccccagggtgatgagcagctggggggcggcaacggggaagattctagagccagaaagcccctgccagtcccgcatctgccctggccatctgctgggctcagcgagtttagcccctcagcacctcgccttcctcacgtgcagaacgggatgataacaggttccccctcagctggcacatcagggaaggtgcaagggagagcagtgtcctggtgtgctctgggctgccccgcctggagaaggggcggggtctctgggagggattccagccacacaactcactgccatcgggggtgtcctgacctgcatctcttacggcccagccgattgcaggtgacagaaatcccagcatgcactggcctaagcagaagggggactcactgacgcagctgactgtgaagtccggagctcagaagccctggcgttgcaggaattctttggcagttgcagcaccgggcccagctcgccttcgcatccttagtgttggcttcaggccgaggtcgactctgccccctggtggccgaatggctgcggcaggggttcaggcccacgggggagtccctgtcccacctgctgagacggaggcctgcgcctggaggacgatggggactcaggctggacctgtgccctccctgagccagaccctgtagagggggattcactcatatgaccgtgtgactgttcagttagcacccccaaaccacagggctgaaagctggggaggctgtccctcgcagggaattcaggggctttgtgaaaagcagggcgtgggtaccaggcagctgacattctgtactgttacttcagccaccgcgtatctgttctgatgtgaaagcaaaagtggcaaatatgtcagcagcgaatctatgagagaattagtctgtaatgaattccaaacaccataaattaacctgacaagaggctgcagcctccttgggctgttcagctcctggaaaccttcaagggttgtgccccgtgcgagaagagatgctcgtggggtcagagatcacgtcctttcctcttccattgctgagaccaggatggtctcctggacctctcatggcctggctggggagggacctgtcccttcctcaccccagccctcagctccccaggccctcacctcagcgttcagggtcagccagtctgttgccagcttgtctccagcaaaagctcacaatcccctgtctgagccccatgaggccactacttccactgtcaccagaacacccctgtgcacctgccccgcacctgtgcaccgccttccatctctaccccactgcgccccatcctcccatcagtgcccacccaggaagcagcttctgtccactgcctttgcttctccatggaaatgtcctccaagcgacaggctggcactgtgtctgcagctcttgtgaaggctcgaggtagcgtgccccgggagagcatgcccaggtctttgcagggcacagctgaaggcattgcccatccttcccacctgcgtctgcacctggcagcccagggatgcgtcccttccggggaggtgcaggcaggcatctctggggacagaccgctctgggtccctctccattgtgcaacccagcacatttcccaatgccttcagctcctctcctttgggcggccaggtctgcccctcagggatgcttcctcacaatcttcttagtgtggattgtgtaacacttgactcccagggctgaggaagcacagccagggagcaggcgccaggcaggaagaggcagtcactgcatcgtgaggaagcttccccagcaccttgctattcttcatcctctggttttattctagtgattttcttagtgccaagcagcccagtactcagtgaataacaagataagattcttcctcaggggccctccacagggttggctttcacttccctgccacccccctaccccaagaaaagtggagaatagaataagtgaggtctgagcagggggagaagcctggctttcactttttaaaaaagtctctgtttattgattgtgattccagactcctgaaaaagaagcagagaatggtcaggttttacaagtgggaccctgggggcgggggcgtgagggtgagacccccacagaagtgcacccacgagcaggtgggctgtggggcctggagactcagggcctgagccccctaggccagggccaaccttgggggagcagaagggggtcatagatcagagaggaaagcacaccccctgcctagagcctccttcagatccagggacccctcttcttctgcttttgaccagggacactgacagctctggccgtgttgagagtccgcagagcttcagctcagcgtcttcccccaagatcttcttctattgttcattttaagaaaagtcaaaccatcactttaaaagtagcacattttggtacttatttctcagtgattgatcctttcagatacggtttcccgggacctaaagattgtagctgaataatgcatgatattgttgtttcccagaaacaggtgttttatttttattgcattagcattatgagaacaagctggctgcggcttctctgagagctgaagtgctggaacacttctgggttttacaggcaccggttgcccggagctgtcagtgccaggctcttggtctcttgacaaggaagctcattatggccgcatctcacctcctccggggaggtgccagatctgtgtgcagcactgctgcatggccgtccacttgttcatcattcattcattcattcattcattcaatgtttatttcctgagagcctctgagtcctggtgctgggatgcactttggggttacagagacaaaaagaccaagctccagcctttaaggaacccacagtctatgagggagacaatctcagtcactggcctgagtgatgaggggtaaaccgaggcatgtgacagtggctgacctgggcagcaggaactccgctagtctctagacttttctctaaagctcaaaggcagaaggtccctgctgtggaaagcccagctgtttcagaagtcaggatggactgggcttgaggtagttggccatgattgacacagcacatcaggaatggctttgaggcaggcagctggtgtgcccagtcagagcaggtgctaactggcccaggtggggacgtctgcataccctctggttctgcccctgatgaaaccctgtatcaccttagccattaccaggggctgtggggcctcagtttccttattatacaatggggtcaatatataacctgcctctcctgtgtcaagagggcccatgggctctagggagataaaaacgcatgctgatggggctggtgtgttcagcgatggggctctgtcagttcacagtgcagttcagcaagcccttgtttagcacgtcctttgagcatgagcagggccatgaagatgaccacttggccctgccctctgagaactcaccgtcagtgtcacaggagggctcgggtgatcagcgggggacacgcgggctgcagcccagtgaggcctggagaaatcttcctggccatggcctcatttcaggcccaggcctcattgcacccttccaagcgtctcacaggaggcctgggttctggacgctgcgggggatgctctgctgcttcagtcccccgaatctctcccctccgtcctggttcctcctcatctttgcaaacagctcaaatgcaagccctgggcctggacagattctccctatggcctaggtgagccctgggtgctacctgaacttttccagagctctctcccacccaccagctgtaaggggatggaggtgtggaaacaccgaggctcctcccaggtaaatgcctcaaccagggctacctgcagggaggaccccaggtcttgctcccggcagggcggtgcctgcacccatctggaagcctggcgtctcgagggcagtcctcacagcctgcacctgccctcctgccactcagggtgactgtcactgtttctctccaggttgacagccaaggcagtggccgtgctgctgcccatcctgggtacctcgtgggtctttggcgtgcttgctgtcaacggttgtgctgtggttttccagtacatgtttgccacgctcaactccctgcaggtgagagccgcggggactggcggggaggcagggccgccagccatcaggagcaggcttgcagggagctagggctgcaggggcaggagggaggcctgccctcccggccacaccttaggagcctgtaatgcggggcatccccgaagcctgaggactctcagaaagtggggcctgcaggatcctgaccccttcagggcggggctgcctatgcttctggccagcatctgtagttggcatgtcctggctgggaatggaggacagtaagacagtctgcctgtggcagctctggaaagaaaggcagagaggtggccagggcggtcccccaggtgctgccctctgtgtgaagggccagggagggtcatctgggaaccaaagacttgggatgcgcagggtcagggccctcagacccacaggcccccaaggaagggcaggcatgggtccccatcgccatccatggccctcccagccctccctgggctactcaagttgcgtctgtgtctgcaggccagtggcacgtcttccggaagtgcctgcccttgcccacgctgagcctgcctgggaacccacctgctgccgcacctatgcccacgcagcaccccctctctgaactcggtccgagcagctgcctgattctaggttggatcatggtgggacccaggacgcctctccgtcctcacgggccccaggtcatgggacctggtgtcacagtgtgcggtgccagtgccactcccaggctgcatgggaggaacctccagtgttcctaactacgtgcaaagggctctaatctctgcgtttcttccctttcttcccagggactgttcatattcctctttcattgtctcctgaattcagaggtacgtccgctctgcttgctggcaggtgcaggtgcagctggcttttcctttccgaaaggtcacaggagcaggaacagcgctgccctgtcagggtggtgtctgggactcaaatcctgagccagccacgttcctgatgccaagttgtgtgccctggggcctgctgctgagcagctcttctctccccgcctagttgctaagcgatatgcaagcatcctctctccctggagaattggcgactgcatcttagggagagtgagatgtaggcgtgctccccacagtcctcctcgagggccttggggaagctggcctggctgtgagaaggaggacttctgtccacgggagctgggaagaggagttttgtgatgtggcctccttggactctggggcagccagcgcaggcttattctttcggtgctgctctgggcctggcacctgccatgtacttggctggggggaggtaggggctgccccaaggacttctgttcctgtgggagaacttttcccaagtcagctttgagcccctaccaggctgaggttgtgggagctgccttgggatggggaatgggcccagggcagaggggccgtcctgcccggtccatctcagtggcggtgtccgtttgcaaggacaggccaggtgggccaaggagggcagagcagagtcgctgagcaggatggtggccgggcagaagggctgcatgatcacaaagcccagtgaccccttgatcgcaacgcccagtgaccccttgcaaggcctgaggtggatcccggtggcaggaaggcagtgcagccatggaagcccgcccgcccacccgcctgcctgcccaccacgcatttgtttatttgcttctctctcacactcaccccgggacattcattgctgagtgtgaggagcccagcagaggccactccacacccagcttccctggcctgcgatacaacctggctctgccccacagagcagcgatgcacagctcagctgtggagccagcagctccgactcatatttccaaatcccaacctccctcgcacatctggttccggagttgcaccggcacagactcctctggttacggctgttgcagcctctgaaattgctctcacgatcccttccccgctttcaaggtgagagccgccttcaagcacaaaaccaaggtctggtcgctcacgagcagctctgcccgcacctccaacgcgaagcccttccactcggacctcgtgagtgcagcctccataaaccgagggtcccagcccatcctccttccccaggctcggttgtcagcaggatggggtgtgcaggcagcagaggtggcttcgggtgcccagcagtctttgtccccctctcatgcctgcaggctgcacgtgctctgggcttgtgtcccccacacagtgccctgtgtcctgatgaagtcaccacagccctaccccttgaccccgaagagtcagggcttcttgtgttcacttagggatggaaggacttagagatcaactgaccgtgaggtggcccatccccgccgccctccagagcccaggcaggcccccaggcagtctggagcaggccctgttagggttctcactgtgccgctgcttcccccctgctggagccctgctcaggtgtcccatcctcaggaagtccttccccgcacacggtgctcaatgaaggcgctcccacccattctcgcactccgcccccgcccgcagctgtgtgattttccatttgcttagggaccacgtctgccctgctccatgggagctggctggctcatgggctgctctagccccacggctacagctgcgccgggtgtgtggcacgctccatgagtcaccgtggaatgaacgcagcgtggacagatgcatgggggtgaaagcgtgggtgccgggcagatgggtgagcagaggagggagtgagcgctcagcacagcacgcctgcagtgcccttaaggggagtcagcgtggagaaccgtgcggctggagacgccacagtgcgcacatcctcatctcccccaggagcatgggggctcccttctctctgcacctttcctcccgcagggagaatcctcgggcagctatgggcccaatgctccccgcactcactgggcttatggctctccccctgggagcaggcccttcactgctcatccctttatgctttgcagatgaatgggacccggccaggcatggcctccaccaagctcagcccttgggacaagagcagccactctgcccaccgcgtcgacctgtcagccgtgtgagccgggaggctgccaaccaggccaggctgcgctcagaacacacccccccaaacagaatgaaatgccccacctttgcccatggaccctctccttgctgctgtctggacatgggtgttgtggccccgagacagctgtcctcccctgtgactctggctgtcggagcacactgctcagcccagcagcctgatgcccaggccagcgtgggccctcctgccttgcatccacccgtgggctgagtgacttcctcgggggattcccaggacacagtggcctgactgtgatggtgcccttgagcctcccttcatcactcagcatcagacccagcgaggccaggacactcggggccggtcccgcagcaccaggaggggatgttcagcctctgtgccttggtggggcttggggactcagggccaaagaggtggttcaggtccccacgcaccctcagtcaggcgcaggcagctgggggtgtgtggggaagagcatgcggagtccccagtgtctgaatccactgagtggtgagttccccacagccggcgctagccgtggtgtgtgtctctgtaggtggtgccggcgtgggccaacctgtgctgtgtcatcagttgggggcccctgcccaagccgagctcgagccgtgggcgggagtcgttgactctccaggtgagggcgacccctctgccctgtccttgggggggtcccctctgctcacgtgaagagccgctctgggccttgaggctgcctgatggtgcctgtgcttgggggagcttctcggccatccgctgtgagttttgcctctttggaccccaattcggccttaagatgccctcctccctcgtgtgccagcctccttggttgttcttgggccacaggagctggccgtgtccccgcagtgcctggtgtccaggtggaaagtggagggcattttccagggcactgctttccccagaggcttcctcatggctcacaggcactctacgaagtttctaatgggcagaccacgcggcaggtagcacagtgcgctccgtctggtcaccatgagaccgacctgcgctgagtccccactgacctggagagggagggctggtgacagccgtgtcttctgtgttgagggaaatttatggactcagattcagccccagaggagatgggataattgttatggacccatgtgtgggcatgatcctgtggaacacaggtttgggatcatagatgtgaattaagacaccaccgagatacgggctgtgaggttcatactgtgctgatagcactcgtggtgtctgtgaaatgtgggtaagacattcaaacctggttttgatactggaaactcttcctttaaaactgtgaccatgatttcattcagcccctccacacccctatgtctgccttgtttcagagtgagttttctatggagcctgtggcccttttgcagcccacctggtggcttcttaatgtaactcttcccctggtcgcctggagtggaccactcatctgcaggcctctcctgcatggggagggtaggcagggagcagcatgtctgcaggggtgaacctttgctcttctgtcaggcgaggcccaggctgcaccagccacctgccacatggtgacagtgccacgggccctgcgtatggcccctgcaaccgtgctctggcgggcacacctggctgctgcaggccaaggccgctgttcagtgaagagtcccatgtttagtatggactaaagtcccatgtttagccactgccccaggctcccgtgaccccagaaaccaggtcacatggaccacagtgccagatcctcatcacgccggtgagcacctagaagtgagaacactgtattcctacaatgtacacttggatatttctccttatttagtttctagtgaaacaaatcaagtaaggaactatctttagtttagatggaattatttgtttttaattgttgccgtattcatctatatagctaatatttcaagataagtaatgaacaaaacctgtctaaaccttttgtttccaatgaatgaaagtcatgcactttatttataggctctatgttttggcttctgcagtacttttattatctatacataatttggccaaaaataagaaattggaaagaatgaaatgtttagtttatagtagaagaaagatgatgacactaagttgtgaaaatatgttgtgatttttatgaaataaactcatgtcctgaaaagaaagtgtgctccttaaaatctgttgctggtggaatgtgaacaggaccgtgagtctcttaacgcatcagtgaaatcccaggctgggatctactcagtagacattcactcagcacctgctgtgagccccacacattcttgctctggggatgccccgggagcctgtgtcccagggatggggtatgaacacaaaccgggggcaagcagcatgcctggggaggaagcgtgggaaggaggcctggagggacgtgcacaggcctttgtctgcccagggtaatttactgcaaaatacacggctgctgcttcaaaggaggcggagttcagccacatgccacacccccagatatactcattcattccttacccatgctgcttttccactctttacagaatttacagggatgtaatttacatggtcctacattgtctctgctgtgcagccgtctgcttttatttatttttttttttttgaggcagagtctctctgtcgcccagcctggagtgcagtggtgccatcttggttcactgaaacctccgcctcccaggatcaagccattcccctgcctcaacatcccaagtaactgggactacaggcacacaccaccataaccggctaatttttgtatttttagtagagatggggtttcaccatgttggcgtggctggtcttgaactcctgaccccaggtaatctgcctgcctcggcctcccaaagtgctgggattacaggtgtgagccactgcaccaggcccaccgtctgcttttaaacttaatgtgcactcataaaccactttccatattactctattgttcataattatgattgtaatataaagtgttccgttacatattatattttaccaaaaatcttgcactgttttataactggattgtttctatgcttctgtgtcatacattaacatttacatatttatcgtatatatatttttatttatgtaacatttcaatattttttatatccataatatataatagaggaatagatataatgtctttgtgcttatgacttttttccttattttttattttgattattttttaggttaaaaatctgaaaaaaaatgggtatgcgtcaaaaagtaaagaattccatgactcttgaaacattctgccaaattctttaccaaaagaatttggtaaagagttatcgggtcagttttcactgctggtgataacttattaatattctcagtgagaacttattgatactctcatttctcaaaacttttacaggaaaggtgagcagtgttctcatcaccagcttagtatgtgtgaaatttatcatttgtattttcttgattactactgagtttgaacagtgtttcatatgtctttacattttcttaggaaggtggctacaattctgaatatataggggagatgtttcatttgtttacagtatcactcattgccctgcaaccatccccattgcgctctcctgtggtgatggtgggaccaggtcccaccggagccgcacaca

SEQ ID NO: 16 - DNA, 598321 bp, Homo sapiens
  source 1..598321: mol_type = genomic DNA
gagtaagagctgtgaacctaaatccccttgcagccaacacaaaatttaccccctgctgcctcggagtgccaattaaaataataaaaaccaaaaccgtgggcagatgtaattagtttgagaacggagtttataattttcctcatgccaagcaaacaagttaacccctttggtgacatatacagaataatctggacaaagggaacacaaatctcaagtctgaacatttcttgtgctatttgccaggaagttgtaatattgaaaaactgtgctcttctgagaatgggaaaatgaggacataaactctggttccaaatggttggaagtgcagtttatgtggtcaggttgtttttcccctttcattaaaaaaactttcaagattccacttgatccgggtttcttcgaaaatgtattactttttacaaatataattcttatagggacagacttcagctgtgtagcaggcaaagctacagaagagaacgttcttgaaagactgctgggtgtttcttagcacaaaccacctctgaaagagtatcaagctcagtggttggtgaagcaaagccaagttcctgtcccacccatctctgggatgaggagttctccatggtgaccctgagtcaggcttcttctgcacccctctgcctggttaatgaggactcaactgaactgcccatctgcaaacaaaccctttctgcatttttctctctagacacgagtgagttatgtcagatggtataatgggaaaaagacaaaggatatttgaatctaaggacatgggctggatcaggtgaagggatggttttgcttttgttgctgtttctgcttctttagtttggggaggaggataaggaaaagggttggagataagactaaaaatgaagttaacaaacttaccctcccacataggggatgcttcatgtcaagccactggtctaatgcctccgtcttctttagttcaaaattatcttattttactcaaccaaatattgcaaacatgattccaccatgttggtttcagttgtgtgcagttccctgactgcacacaagtcagggaactaacttgtgacactaaagaatgacaagcaaagcggcatcccagggctactggttgaacaggaaccctgtggccattgagatgaccttctcaagcttcctgttgagccttcactgggacactgggagcgtgcatgtgcatacgtgcatgcatgtgcgcgcgtgtgtgcgtatgtgtatgtatcaggaaatagcaaagacaaatagtaaactatagttataatgaagaaaaacatacttcttttccatgaaaaatgtcagacttcatactgataatctgtgggagctacatttaagccatttatgaaacaaaaagattgcttttcgagattataaactgggagccagaacaactgacttgaacgtattttgattctcaagtttccgtgtaaaaatattcacagaaattggtggatgtcttttacgtacaactcaacttctctcatttacaacataaatcatttaatgtaacatttgcaaccttagaaaggcagacatgtttaatccaagtccgtttataaattccaatttcacatggattaaaaactgcagataaattaagtcacaataatatcctgtacatgcattaaggctggtgactgctaaagtctcttgggaatctacaaataggaaatcacacgcagattactgggtctgaagagtgtctacattgttaaaaaaatcttgcttttttttttttttggtgatgcagatttcaacagtaactctggaaaactgtgaaaaatgttatttaaaaatatatatgtatatgctactgcacagtttcaaagatgtgattcataaataatgttggctgcactgattaattttataacaattactgcacttccaagttgatgcgaacacgcagtgactcatactcaatattaggcactagtaatatccttcaggcgtactacagttttatgttagctgtattgtacatatatatttttaaatgtatgcatttatacaaactgtgtatattatgtatggggtgtcagaaatgtacacatcactgttatataatacacacatcattgttgtacatatgaggataagttttagtgcagaaagtctcattgcattgcattccatgtgttcaatctagtacacaatttgtcaactcttcagattatttttccagtacattcctcattagattgtgggtttcaagtttccatttgcaatttgaatgtttccagaaatctctgtcttaaccaaacctctctctccaggcacgattctgcacatgagtctgatctgtgtagagtagtatcatcaaaaatgccaaattttgatcaggaatatacctggactactctctttcaaaggcaattgaacatcgtgataaaggatagcatctattcaggtcatggaaggatatggtcagttgaacttgtgttgaactttggaggcaaatgtacgtcttcaaataaaaagacatggtaataaaaattatttgcttaaatttgagagtctctggaaggatatacatcaaactgtgagcagtggttgtctcaggcagaagggacaaccagggacttacactttctactttctacatttctgcactgtttgagtttttacaatgagtagatattacttttctaattagaaaacacaagaaaggtatttcaacttgaaacaaaactaaacaggccaggcatggtggctcatgcactttgggaggccgaggccaaaggatcgcttgagcccaggagtttgagaccagcctgggcaacatagtgagacccccatctctacaaaaaaaataaagaaaaaattagccgggtgtggtggcacgtgcctatcttcccagctgcttgggaggctgaggcaggaggattgcttgagcccaggagtttgaggctgcagggagccatgatcgcgccaccgcattccagcttgggctacagagccagacccggtctcaaaaccaaccaaaccaacaacaacagcagtaacaacaaaactaagtaaaaggaacaagttatgaatgactttcacaagcaacaattggaggatggttactaaccaaaatcacccatgccaaaccccacagaaactgctgtaccaacgtgctccacacgtgctccacagatgaaacaagacagtcataagaactacacgctctgaccactgcccacaacggtaagtttcaagaagttttcctgggaaatgtgggccatcagagtgctgataaaacactgctggcccacctgtcaaatggggcttcacagggaagctcatcacatagatgttacaacaaagtctgcaactttcaaggtgggcaggaccagagaagctctccaggtatgcaggatagacctccagggccatccctttatgtgtttgaatatttcatcaggattcttcaagagtaggtagaacaaagcctcagtcctccaaaaaaatgactcaaaatttcttaagttaggttcaagtttctgacataggatgggattgtgaactctgccaaaaattagtgaaagggctgggtgtggtggctcacgcctgtaatcacaacactttgggaggtggaggcgggtagatcacctgaggtcaggagtttgagacgagcctggccaacatggtgaaacccagtctctactaaaaacacaaaaattagctgggcatggtagtgcacacctgtaatcccagctacttgggaggctgaggcgggacaatcacttgaacccaggaggcagaggatgcagtgagccgagatcgtgccactgcactccagcctgggcaacagagcgaaactcgtctcaaaaaaaaagtgaaagggttgtaagaagcaccccagttggagacatgtaaaatggaaattctcttaatatttccaaatgcttgaaggccaaagccaaatgcaaattccacaagcccttcttattttcaattaatttcaaatcatctaagttgttcagtcatttatacaattttgaatcagtgctcagagctaaggaattatgatgatcttacttcccacctacagatcaggctaacaaaaatgttaacactgcaaaccaacctgtaagaatatcagtgaatgtttatggatcagcatctagtctaagtattttgtgccgtcatcaccttgaaaaaatggattgcaccacatattacaccgcctgcctttctcagaccgtcctggtgcaactttatcaagtaagaggccacaaggacattatttttgtttttaacgtgtggcaagatagaccctctttttcaggagttattttcttttcgtcaagatttcatatccaaatatatttaacaagatgactaaatctagggcataagacactacaaaagaaaaaacatcagacaaaaactgtaaacaagatgtcaaagaaactaaaatgtaaacttaattaaaaaaagaaaacaagagaaaaactcagagcaaggtgtaaacataccagacacacaggacacaggaagaggctctggttgctgctgccccagaaaggaactgtgatcttctgcattgcaagcagcctgctaatcaaagcctgaaaaatcgcccccaaatcaaaacgcatcaaagggctgcaggtgcacattctgcatgaggagtgagagaatcagcattatcatggcaaatagctctcagcctggtaagcgaaggattcaggctcctactgaagggacaatctaggtaatggcctcatttagccaagaaaatctgtaagaaagctattggtggaaagaaaagacttgaaacagattggctgacaaatgccatgtggctctacagccaccgagtcacagtggcaggaagaagaaatgcatgtggctggtgggcttgttatcacaggtgcagaaaacttcaactcctaactgagctccaacacacaggcactgctaccttagtgtctgttaactttcaaagacgccgcgtttttgctaaatctcagtgccatttgcatactacttggaggtggggctgggaagggctgtgagtgtccatctgtttgcctggaatgcatttagttgataatagagtcagatgggggaagggaattagaggaagagcagggtatttggtaacatgcaatctagtaaacttccggcacaaaaatacctggcttattttcattattcaattacccattaatacataccaatcaaaaaataattggggaatagtatattaatactgaaagtaatcaacagtataagagcaggtccatcttcactggcagtcaagcttttggtgtgctgtattgcacctggttaactaacccatgagattttggttgaattttctaagaagtcacggtttagcactggaatggaatagaaagtgtgtgtctgtgattgtgtgtgagtgtacggtgtgtgtgtgtgtgtgtgtgtgtgtgtgtacttcctctagtcagaaacctctgatcactttgtctagcctgggattatggaaactagacaaagaaggtgtgttctgaagagctgtgtatcttacacacatacacaggcggcttcttatatacccacacatacaaacacacatgccctgcaaaagatcattgttcaatgctgaggaaatgttcaccgcagtctgataaatgctgtggctgggagtttcagtagcacagtgtccaaaaacgttgagccatctgtggagaccagagcccactctggccccagggtgaggtccctatgacaggtgggcgctgttccgcagccagtgcaggccctgttgggagtactggaccaggtgctccatgctgctgtgcagggtgaccggccccatgagcagatccaggtcgttgaagaattctagggggacagaaagagttgttaagaatgccacacatgctaggtgtgctatcctgagcaactgatgtaaggaaaaattccattcatggtctctatataaatcaaggattctccgttccatcatgtaactttagcattcctttgaacaaaataaaatccaaggatggggaactcatcctatatccaaataaataaatacatgatatctgccatttctaactcaaatgaatagtatttgcttagccaaatagcaaagaaaatccatatcctccagctgcattctcctagtccagtaatgcttcccactcctgaacgtgaacgtggctctgtcgtccctcaccctgtactcaattctggtatgcgctgagcccctggagtgagtccaaggggtgaggctccaggttcctgggggcaaatcagagatgggtcacgagacatctggactgaagtcaccttctagcttttgaacattccctaggtttgccctttcaccaaatgtttatgatgtggccaagcacggtggctcacacctggaattccggcactttaggaggctgaggcgggtagaacgcttgaggtcaggagatcgcgaccagtcaggacaacatggcaaaaccctgtctctactaaagatacaaacaaacattagccaggtgtggtggcgcacacctgtaatcccagctactccggaggctgaggtgggagaatcgcttgaacccgggaggaggaggttgcagtgagctgagattgtgccactgcactccagcctgggccacagagcaagactccgcctcaaaaacaaacaaatatctatgatgtaccaaggcactctgctaggtgcaggggtgggtaggggatgatagcaggatgaattgtgtgggctctgctgtctcaaaatcacagtttagtggctgatagaggaaaacacattcatatggctactctactgtcatggctggtcactgcatacatttcttgggagtaagcatctgggagaagtgtctcaaaggtcctcacatacatgctgaatgaagacttgctggggcagggatggggaggtggctaggaggttggccagggcagggatccaggggtagaacagaggaggaggagcaggtaggggtaggggaacaatgccaagtctgcactggacacttggcactgagccctctggtaggagacatctagcaggcagctggcagtgccatctggagcttggcctgctcacagtctcccaaactggacacgtgtatttctatacatttgtcctttctgttttgtccactggtgacacccaccccacctatttcagtcactcaactgctaagcgcttttcttttctttattttttccttgagatggagtctcgctctgtcgcccaggctggagtgcaatggtgcgatcttggctgtctgcaaccactgcccgccttccaggttcaagcgattctcctgcctcagccccctgagtagctgggattacaggcgagcaccaccacacccggctaatgtttgtattttcagtagagacggggtttctccatgttggccagcctggtttcaaactcctgacctcaggcgatccactcacctcagcctcccaaaatctaagtgcttttcaaagccctgttccatggttccatgccagctcctctagcaagctcctcctggtggcttctgacccccatggcattctcattggactttctctgggctgcatgttatgtactatgtggttttatttacaatctcatgcactctgccatacattccttatctcatcctgaacatcttgctctttggagctatcatgctcccatgctatcatgggaacatagtttgcatttcatggagtgaactcagatttgcactcttacctgctgctgtagggccaatagtaaattagtataatctttcaggagaagagttaacagcatatgttgatatatataacaatatatatcttaagagaatctgtatctgttgacccccaaattttattccacaactccctcctaagaaaataatcagaaatatggccgggtgtggtggctcacgcctgtaatcccagtactttgggaggctgaggcaggcagatcacgaggtcaagagatcgagatcatcctggccaacatggtgaaaccccgcctctactaaaaatacaaaaaaattagctgggagcggtggcacatgcctgtagtcccagctactcgggaggctgaggcagaagaatcgcttgaacccaggagacggaggttgcagtgagccgagatagtgcccattgcacttcagcctggcaacagagcaagattctgtctcaaaccaaaaaaaaaaaaaaaaaaaaaaagaaaaagaaaaagaaaaagaaaataaccagaaatatgaacaatgacttatgtagggatatttacaccaacattatttgtcacagtggaaaaaaattggaaggaacttaaatgtctaacaacaggggaatggtttgagaaatcaggatactttgtgactgtataatcaatgtactaggatattattatagaaccaccataaagggtgtttttgaactagttagtgacatgagaaaatgcctgatataatgtcaaatgaagaaaggatatacaactgtgtgagtatcccagctactcaggaggccgaggcagaagaatcgcttgaacccgggaggcggaagcccctggttccccgtggggtgtgcgctcacctcggttttccttggccaggttgtcggccatctcccagtagtcgtagctgtgcaggatgctgttggtgatgctgacgtggttggccgccatctggtggatgcgctgtgggatgctgacgatggtcgacggggacagggcgctggcgttggagaggctgccctgagaccccacggagctggcgggagaggggttgggagacatgggggatggggttccagtgctcctggaaggggagaggtagaaaaaccagagtggcgaggtcgggagcaagcgaggcagggcagccccttggggaacagaaagcaaagcgcagtggcccagcaccatgcattgtctggcttacggcattgactttggaaaagcgaacttactttccactggccccccacggagatggggcttgggcggctttagatgagttctgcaagaaaataaaaacactgacagtgagtgccatctgcgtgaggtgaaacaggtgacatgaacgtgttttcaggtgactgcagagagaagcaaaggcagacactgcaggaaaaaggcaccttcagagaaactggacctgggaagtctccatcacagttctctgttccctttctggaagggagtcgggacagctgcctggacttcggaagtttaacagtatttctcttaaagggagttgctcttgaacattcctaagagaatatatttaaatgtatttccctagcagacaggatactcaaaagttctagtttatctgaatattctgatttagaagttattttgcatggacaaggtgcctgcatcagccctcagtgaggtaagtgaagggcttcacccacagcctgggtttttatgtacaaattttaggtaccacattaagtcataatcccaacggtctgttaaatcttgaagcagccttactttttcattgtaaattaatttttcttaaaaggaaaaaagagcaggaacaccctcatatctccccttatatacaatactttatatttaaaagtaggacatgtttgcagaaacagtcgacatacatttacttagtgcctgaaaatacatgacatcagattgtattgttttaacttaggaagtttaaaagtatttcttcttaaagtaagttgctgttgcatattcctaatagaattgattaaaatatatttccagaacagacaggatgttcaaacattctggtttatctgaatattctggtttaggaagttctgttgcacaagccaggtgcttgcatcagatatttaaaagttttgcctctagttagggaagttgctcaatgcacagttagatttcccctctgagaacccaatcatgccttcataggactgttaagggagaaagcggtctttgtgatgctgatgggagttttccccttccagagacaagaaaacagcctcagcctggttctccagagacaacatgtttcttttggttagaaagaactttatggagtggtgactgatttttctggttttagtgcgggtgttattaaaatggcaagaaatggcctgtcagaactctgaggtgctacaatggcaagatgtaaatgtaaggacaacaccgcaaaccatgccacttttacctgtgtcaggaaatacaattattttcatgaggagaattaggaaaccttcctgaacaggggagcttatcctccctttcttgacacaatgttactgacacctttctcaagctggtgctactggactgatcactttgtttccacttcatcctgtggttctgagaacgtgatctatagaatgcatgttctggatataagaacactaatggcagaaggggagaaaggcttgggggttgcagaaacagtccagtaaaggctactgaatggaggaagaaggcagtgactcacgcctgtaatcccagcactatgggaggctgaggtgggtggatcacctgaagtcaggagtctgagaccagcctggatgacatggtgaaaccccatctctactaaagatacaaaaaattggccgggtgtggtggcacacgcctgtaatcccaactacttgggaggctgagacagaatcgcttgaacctgggaggtggaggttagggtgagccaagattgtgccactgcactccagcctgggtgacggagcgagactccgtctcaaaaaaaaacaacaaaaaaagaagtcttgagttctcttcctctaccactaagccccatgcccaagaaataccggtaggaacaaagttctttttttttagagatagctctgtactgataaaacacatatagccaaattgtcttgggtacctaaagatttcatggtttctgaactcaaagtagcatttaaatagcccttgaggctgggtgtatggctcacattggtaatcctagcactttgggaggccaaggcagtaggctcgctggaggacaggagttcgagaagggtctggacaacacaaggagaccctctgtctacaaaaaatgaaaaaatgagctgggtgtggtggtgtgtatctgtggtctcagcgacttgggaggctgaggtgggaggactgcttgagcccaggaattcacagctgcagtgagctccgactgtaccactgcactctagcctgggcaacagaacgggacagaaaaaaaaaaaaagtccttgaaactttgtatccaagtttcagttatcaggaataagttctggagatctattgtatgggatggtgactacaattaataatgatatatagtatacttgaaaatctctaaaagaatcgattttaaatgttcccatcacaaaaacggtaagtatgtgaggtgatggatatgttaattagcttggtttaatcattccacaatgtataaatatatcaaaacatcacattatacataagtacacgcaatttgttgttgattaattaaaaaaattttaaaaatagcttttgatgaagggtaaatgacattaattccttgaggagcaactctgattttctggttgtgttttccttttttttttttttttttgagacaaagtctcactctgtcgcccaggctggagtgcagtggcgccatctctgctcactgcaacctctgcctcccgggttcaaacgattctcgtgcctcagcctccctagtagctaggattacagatgcctgccaccacgcctggcgtgttttctacccattctgtatgtattagtgggctgcagagaatattaagaacttgtatcccttaaaagtttgttgtagcccctggcggcttacagaattcagcttccttctttattcaagcattttccttgactgtaataattctctttagtagtagatcttacgttctggatttttgaacactattgatgttgactttaggcacctgaaggaaagggaaggctcagtgctggttcttgtcctgaagacacaggacggtcaatgggctgagaaagtgatgtccatggcctagcacctggttactctacatgcacaattggaaggcagtgtgctgaacataccccaggaacccccagcacagcctggccattagagatcacctctagaggaggttgggcatgaacagatctcaaatgatggttgtgtatctgacaaagggctgttggagatagagacggcataatttctagtttctatagataaacagagaagaggaccagaaatctcaaattaattattaatgtaaggtcgacctcacaacagtacatcagcgaaggcttttaaaaatttattctcccagtgaaaataatttcattccctgagataagtaaaaggtggcatggtttgcaattttatccctatagctacacactgctatctactgcttctgagttctaacaagccatctcttaccattttaaataacgccattaaaaattaaataagctactagagactggctaagagggaatggctctaaggggttacttctaaggaaaagaagctctaagtgagcatgaggaatttatgttagctataaagatgaatttcctaggacagtggaacgagtaactggatcttctttctcttgaagccataaaaatacctggacaaggctgggcgtggtggctcacacctgtattcctagcactctgggaggtggaggcggggagatcacctgaggtcaggagttcgagaccagcatgaccaacatggtgaaaccccatctctactaaaaatacaaaattagccaggcgtggtggtgtgcgcctgtaatctgagctacttgggaggctgaggcaggagaattgcttgaacccaggaggcggaggttgcagtgagccgagatcgcaccattgcactgcagcctgggcaacaaagagtgaaactctgtctccaaaaatacataaaaaaataaaaataaaaaaataaaaatacttggacaagaaggcagggagatacattagatgggctctcaaaggtccattctgaggcctgaaagccacaagtgtggcataaatggggttaccttggggaccagaggtgacctgcattaaccccaaagcaatggagtctaccaggtgcttcacaaatttgacagggagacaagtgaaattaaggaacaattctgctcattcactagacagtaccttgaaatagtcgattagtgcttttgaatactttacagcgtggtcccttttgagtcgaaacatccgccagtacaggagggccaggcatcggtaactgcaggcgaaaagagaaacaggcccagaagcggctgagtgcgtcgtgcgcaaacaagacttaaacatttttgttgttgttctaaggtactcaataacaataccttgtttctacataggaaatctttctatacgtgcatataatgtctgtgagggaacatcttttgtccaaaaatagaattcaaaattccaagaaggtattccataaatacatttatcactagataattttacagcattaggtgaatcactctgttgggtcacaggggccggccgcttccttcttccaccacgagagggcgctgtctctccacgagaggcgcgaggtagctctagtacgcagccttcactgcttcgcgggcgagccccgctctgcggaaaggacgacgctgccacctgatgttactgaactataagcagctccactaaagtcacaaacatgaatgtactttataaacaacaaaaacactatgctgggaataggtgccatcattataaacaacaaaaacactatgctgggaataggtgccatcattttattatttcctataatattttgtatacttatttatatatcagtattctatcttatataatcatattattgtcatttagtgtattattccaatatgggacttaaagtttgaaaggggcacaaaaggcgtttctgagacttatcctctcttccttggagctcttcactcagttatttgctaactcggatctgatgctgacatccagaataccaacattctgggtgcaatggcaccatctcctcctaccaaccaaatccaggacaggtaacaatttgagaccttttttgtgtctgttgctgttattattattttttaattcaactgtctttatttcactgcttggtagacatgtattctatcaacattctctgccttccacctactgatgagtaagaaagggctgacaggtaaaggaactataggttacccgatcgttcccttttttctgtggcatcattttcaaagtaagcggctgcgccgggtgcgatggctcacgcctgtaatcccagcactctgggaggctgaggcaggcagatcacttgaggtcaggagttcaagaccagcctgaccaacatggtgaaaccccatctctactaaaaatacaaaaattaggccgggcacagtggctcatgcctgtaatcccagcactttggtaggcctgtcgattttcaatcactgtgaattcagatcatgtatagtacggcagcaaaaaatggtctggactttccctggtcattagaactgctctggggctttgtatgttagaagacattgggcaaacactatgcctttcagcacctggtttgccaatgatggcatgcgaggctggggctgctattctaagcggagatgggcactcaccataatgcagccagttgtttgtcttctggtgtggcattggggcctgagtgggtttttagtctcatagcataccttagaaaaagcggggaggaggaatagaataaaaaacataaaaagcaaagaaatagtaaaactagcttttttattaacagaacttctatgatggtagttctccctgcctgatccttagcttttcatagtacttgctgataattctttcttaaaagctagctggtgctgctccattttcccaagtattacattactgtgatgactagaacagctactttctgctctttaacagtacaagttcaaatgctacagattgtcgggagtgataccagttcaagaactattcatgtatatgctaacatgtccatttttccacattttgatttatggctgagtgtctgacagatggaggtgaagttctatccttctgtgcttacctccagaagaatttccatcctgggtatgcagaggaatgcttagatttacccctctttctttgttatgtaacttttactttgacagctacataagtgtcctgagtacatttttaatctctgtttgcttctacagacagatactacgagaaactagtggcttttatggactgcacttaattccatttatttttctgaaccaaggggactgtggccattgctttctcccaacaacataccaaattacatatgcagactctttgagagagctgaggcagtatgtgtaatgatcagattgtcctaggttcaaatctcagctcagcgacttataagttgtaagtgcttagacaaatgtattaacatctttaagcctccatttccttatctataaaataagactaatactgccaatcacataacattgtgttaagaattaactaagatagcgtttgtaaagctcttgggatagttggctggcttgtaaattgctcaagaaacatactgttatcatcgcactatctcctcaacatgcagacttgtagcatttttcagtgttatctctttgcataatttttacagcggttgctctggattttacaatatacatgtaatttattggtatcaacattttatcactttgggatagtatggaagtcttacttcaatttagatacctttaccttccccacttaaaaatagcattgtcttgagtatcagatggtggtataattttttattgttttgttttgtagcagtggggtcttactatgttgtctgggctggtttcaaactcctggcctcaagctatcctcccagcttggcctcctaaagtgctgtaattacagatgtgagccactgtgcctggactgctggtataatttttgtttcaatcctcaaacctggtttataaactcataaggagtagtttattgtatatatatctatgtgtctgttcttccttctttcccaatgctcccatattccttcttttgtcattttatttctgtttgagaaacttcttttagccagtctttaagggtgggtcttttagagacacatacttgtacttttcctaaatctgaggctatctttatttcccttcattcttgaagaatagtttcactgactctagaattcatggcttcacagttccttctttgaacccttggaaactgtcacgccactccctcccagcctgcatggtttcagagaagcctgctgtcattcgaattgattctcccctgcagataattatcgtttctccctggctgctttcaggatatttggcctttagtttttggaaatgtaatcatggtgtgtttttgcatgcatttctttgggtttatcttatttaggtttttctctgcttcttaaatctgtaggtttatgtcttttgacaaatttggcaagtttcagccattatttcttcaaatactctctcagtcctactctctattcctctcctctgagacttccatgacacaaatgttggattttttcttattgtgcttgaggctgtgttcatttaattttttcagtctatttcttctttactgctcagattgggtaaattatattttttgtcctcaagttcattgactctctcctgtcatctccactctactactgagtccatttttggggtttatattatcaaattctacagtttcacaatttccatttagttctttttaaaataacttccatttctttgaaaagattttctggttttgtttgttgagtgataactgtgattattgaagcatttttacgatggctgctttaaaaatccttgtcagataattgcagcaactgattcatctttgcattgaggtcttctgatcatcttttttcatgccagtggtgactgtcctagttcttggtatgatgagtgagttcctatggtatcctggacattttgaccattaggttaggagactcttgagtcctattttaaacccagccaccctgtttaggtctagcaggaaggccctagcctactttgggggctgtggttccaatgataatttaattttcagagcctttctgatactattttagtctgtgtggttgatctggtgccaccggggcttcagctcatccctgatggtactgcctgcggagagtggaagggtgggaggagagggtcaccaggctgagctcgtgtggtggcagtgctccactgacccacgcctgcttggccatctggagttccctggtgaagggaattctgcccgtagggacaaagtgtacatcctgggctaggtcatcttggtggtgagaaccccttgccagcgctccaggcccttcagtgtctcagtaggggagaggagggtcaggcagggtgggcaatgtgcggatgtaattaatgctgttttcttttttttttttctttcttgagacagagtctcgctctgtcgcccaggctggagtgcagtggcgcgatcttggctcactgcgagctccgccttccaggttcacgccattctcctgcctcagcctcctgagtagctaggactacaggtgccggccaccacgcccggctaattttttgtatttttagtagagacggggtttcatcgtattagccaggatggtctcaatctcctgacctcatgctctgcctgcctcagcctcccaaagtgctgggattacaggcgtgagccaccgcgcccagaaaattaatgctattttctaatgtaggttgaaaaaagagctagccaggtgcggtggctcacgcttgtaatctcagcactttgggaggccgaagcaggcagagcacctgaggtcaggagttcaagaccatcctgaccaacatggagaaaccccatctctactaaaaatacaaaattagctggatgtggtggtgcatgcctgtaatccgagctactggggaggctgaggcaggagaatcacttgaactcgggaggcagaggttgtggtgagctgagattgtgccattgcactccagcctgggcagtaagagtgaaatttagtctcaaaaaaaaaaaaaaaaaaaaaaagaaagaaagaaaaagagccaaatttgtctttttgtctttgttttctctgtattttgcgtgattctatcgattctgaagtatctagaaggtggacagtgttctctacctgtgaaagattacttccatcagtgggcacagtgggtgtggtaccccagcaccctctctttgatggtatatctggctggcatggttttttgtttgtttgggcttgcttgtttgattttcaagtgtgaatgcctttaagcaggtcatgatactccagttcacagcaggccctatggcttgcttattcattgattccttaattgtttattaagcacatactatgtgccagaaaatattcgaagggctgaggattccccagttagcaaatcagacaaaacccaaaaaactccctgtgctcaaggtactcacactctagggcatcttccagctttgtccctgtccagtttctcccactttcctccctgcctgcctatgaacatctcaggctgggccttgttctgaggaaggaatgtatggatctaggatccgttagagtaacttttaccagtctttttactttgctgctttcatttcatcactactgaaagtaatgtgccatataaaaagacagtataaaggattcaccaatatattgatttagtagaaatactttattaagaaaaatgggcagtgttgactttaaaacattcttgaaaaatgctttatggaggtgatgtgttctctgatgtcggcatgacagtttcaaaggctggaaactatttactgagggaaagtggtgtgtaaaacaccaagtagcatctttgggccaatgtagaccaaaaagatcacatcctaagatgattagaaatcttccatgcagaatgtttggacatggtggaaaatgtctaagctttgattgcacagaaccccagaatcagaaaaacttttaaaagttagttttaggaagaattatttctcattatggatattagacattatgtcaagcagttaaactggctaaaaacataaaccatactatgaaggttctcagtagggctaatggatgaaattcccttaactgttggttacagagatgtgatggaggtgcctttccaggtctccatcatggaggataagtgtttgccatcgaatgccttgacacgtctgctcacaggtcttcacccaggtttggggatggtgcccatgtccagtttttagaccagacagtataagatggcttctccttccataaaatcctcctgaatgttcttccattaaatactccagaagtatttactgatggagctaagatttagatgatactaacctgaaccagatttttttttttttttaaagcagcctagggctgaaataggctcaaaatctgccacttcctagctgagaggagcaggcatgtcacagcccactcagactcagcctcctccctcagcaattgggggctacagcagctgccccccttgctcacggaggacagagggggcagggtgtgccaagacgccttgcacgaccttaccctcttattttggggggatgaacactggttcctggtgggggatggtgcaggctgacattcttttctctgtaaccatagtgcttccacacattcctcactcctcccctcatccagcaagaaaacacggtgcttacctgatgagctctactgtttctgaatacatcgtataaggagatttggattccatggggccttgttccattgcatttccacactcgataaacgacaatgctgcttcagcatagttcaaagcctttccaaacttttccacctgatcaacagagttaatacagtgtcttcctaaacaatagttttttttaaatggcattgtcatgtagtttatacaccttatttgagaaacccaactctgacttctaaaatcctatgaagctgagagaagaaagaaatagaatacttcttttcctacttattttctcaaactgctactggcttggagtaagtgagcgaacagttatatacagaattgtatcaaacccatgtgacagctgtcaatcaacagagctcagaactgcatggctgctctgatttctgtttccctctttctaacccctaatggtttggcgacttcattccttgttcctccatgctatgctaaatatgcatcaaagttggtaggtctggtcccatataagagttttcatacttcttttggtacatccccaacttggatggttctaggccttggttattatcttttacattatttgtggcacttatatctccatgccttcctcttctcaattttttttaatttttttatttttgagatggagtctccctgcaacctctgcctcctatgttcaagcgattctcctgcctcagcctcccacgtagctggaattacaggcaggcataggccaccacacctggcctcaattgttttttttttttgttgttgttaatatttagaacctcacttaagagtgagagtgagtaggggaaaggagaggagataaacctcaaggagctatttcagctttgctaaaataggacaaaaagttgaaaattattaataaaaatgatttttggttgggcctggcggctcatgcctgtaatcccagtgttttgggaaggtgaggcaggaggatcactcgagcctggaagtttgaggttccagtgagctatgatcgccccactgtgctccaacctggataacacagcaagacgctgtctctaaaggcaaaacaaaacacatttctacgggattatctgtagctgtcgaaatttgtgttattctttccccacatcagcaagggcagccacaaatcagctttatattcttaagatctcatcagtctaaacttatgcatcaagttcctggttccataccttactactctttgtaggtaattacatattctaactctggattgcagaatctccccagttttcaaatgattcattcatcaattaaaacagaatgacataatactcaaatactattccaagtcttgccactaaaaatacaaaaaaaacttcattagtaatgatagcttcaaaaccagaaatgcagagcaaaacttcctctccttagcaaatcaaaattttaaactgcttataaaggtagtgtaggctataatgcaacatttcttttttcttttttttttttttggagacagggtctcactctgtcacccaggctggagtgcagtggcatgatcttggctcattgcaatctctgcctcccgggttcaagcgagtcttctgtctcagcctcccaagtagctgggattacaggtgtgcaccaccacacctggctcatttttttttttttttttgtatttttagtagaaacagggtttcaccatgttggccaggctggtctcgaactcctgacctcaaatgatccacctgccttagcctcccaaagtgctgggattacaggtgtgagccaccgtgcctggcctataatgcaacatttcttgataacactttcagatgaagtcatttcatttagtattaatatttcctaaagcacccaattctgtggtatgtgcactccacaagcgaaagctctttccaggaacatataatagacttggagagagaaaatgtacacctacaagacagttcaaagtgcaaggcagtctgtgattacccaacaaaatacaaaatgaggcatccagtgcaaatgagatggaggaaagtgagctagtgatggggccgcagagaggctgggaaggccacagggaggagactgaatatgacgccgggaaggaatggtagggtttggctagatttggggaggatgctgagggtgtgagtgtgcccatgagagtgtgtgagagtgaatctctgcaggtgcaaaggcccgctggctggcaggagcaaggtgtgcttagaggtcagtaggggaccagcctggctggagcagagtgtctcctcttgggaaatcgtcaacaggaaagatagggttgggcaagaggacaatgaatgaataatgctgtaaactttagatgctggattcaggcagaaaatctctttctccttaaaaatctgatgctcttctccaagagtggccattcattggcttctccagatgaccagaactgtccatcagactcagattgtgtggacaagagctgtaccttccgctgccctcctctattttctgatacgtaggggttattcctcctgtaccccagtgtacataggcagtggtcttcacgtaaataagtgtttaataggtgacactggtagcattggaagaggggtactgttactgtttaaacatcttcagtattctgaaggtcactggaaatgccttcttcatttccagcacctgcctcaatctcagttatgaacactggaggagactaaaactggaattactaggtgggaagatgtccctttggacttcattcatttaagatggaacaaccacatgatctcttttagaaaagaaaacaaagttttccatctcttgcctgagagcttcaagctttccaaaacaggagatcatccaagcaagaaaagttattctttgaaaacatcaaatcatggtgactttagagtcttacgtgcagataatagtttctgtgttgtacagtttcagagaaagcattcatttcggcagatacatgtgaagaacacaagtgtttttgaaaagagatttgatcctgggaccaagccaagggtttgtcaggctaacaagagaaaaatgcaaatctagattttactttttaaaggaaaaaaaaatactaccgcccactgcctccactggctctagttactattcaaaccttaggactaaattgaaatattcatttgtctagggctttttcccagtcaggcattattggttgaagtcatactttattgggctatgaacatttgattatataaacatttctccattgaacagacccggccatccttgtaatagattttataattaccccagctatattgtcccagtgatgaagctgcagtacacacataatttggaagaacgtatctggaaagaaaagggtctcaccattgcatctgctttatgcttcattcgtttagcttcttgcataaaataatcggcactgcgaggcctacaaggagagaatgatattaaacgtcattatggcttaagtgcaacgtctttttaaaatattccttcctttcactcaaacttaaggcacaatttaaaaactctgcttaatgcggaattaagtgtgttttttgcctttccaaactactgcctgtatgtcaaataccacaatacattttctcttaagttagcaattcgaaacacactcaacatacgccagtagtctctatttacagtggatttaacatggccccctagggcctaatttgtgaatatatttttttattgtatggttaaaaaaaaagcgagaaatcttattttaggtaatatttacataaaacaatccccttttaatgtaaagattgtaaatatacctcataataattgtatggctatatatgggtgagtatatttatgtatccttatgaaaataagtgtcatttatatgcatatctagtacctagagttttatgtatatattgaattatcttaaagcctcacagtgaaaaataaaaagaggtaatgttggatgattacattccagttgtaatgaagttaattgtaaaatgatgtctaccttgtaacaatgcaaacatgccatgtattctctagagttctgattagctagctggtaaacattaacagcagacatgtggattattaaagcaataaccctggccagcggtgactctgccgggagatgaaggtaactcatccagagactgatttgagtgtgtgtaatgaggcccagttacgctaaggtactcattagacagtatctttaagtgtttagcccgatagattaaaaaaatgacatttttaggcaccggcagcataaactttatataatcaataaacttgacctattcatgaatatcaaatataagccaggactctctgaacgggagattcgacggaagtagtgatattaatcatggactgtttagccaatgattacatgcttattttgaactgccttatttcagatcctaatgggtcttttaccttattgtaatattaggtagtcagaacattcatgtatccaaagaggtcaaaacgcttagaaaagcaatgtgtgacaatgacattgcattttaatcaaacaaaccagaatcacagcatagttttggggtcaaaatgtttcctcaccccatccccatgcccccctctgagggctggagccgtccattcattgtggtgggtctttcactgagggtgaggcctgaggtctccttcctaggaaggccctgctcctgccactccgttttctctcttgcatctcctgggtgcccatgctttctccatatgaatggctttgttgttgccttggtgagttttccttctttgtccacatattgacacatattgtaagaatgtccatatattgtctggtctttggttccaactctggcaattgatgttatttttgttgttgttttttgagaaaggttctcactctgtcgcctaggctggagggcagtggtacaatcacccatactgcagcatcaaccacctggggttaagcgaccctcccaccacagcctcccaggtagctgggactacaggtgtgtgccactatgcctggctaactttttgtatttttagtggagacggggttttgccatgttgcaaaggctggtcttgaactcctgaggtcaagtgatccacctgcctcggcctcccaaagtgctgggattacatggcttccatcacatcaccatcctgctcacagacctaaaatcaatctccagggtctacgagataaaatctcagttcagatccccaataatcttgcccaacccacttaatcatattgcttactcacgaaggcccttgaccaaagtcagaggtggctcctcattgtcttgataacatggcatcctggtccgaggagctctgctcatcacttcccccacctggaacactctcctctctgttcattcactgagtgccttctaggagccgaatgttgcctggccctcaatttcccccgccgtaaggcgttccgagtaaccttggtccatgttcccctctgtccttcctgagctcacacagcacttcttgtttactacacttggtatttcattatcttctgagctgtactgggcatgtgtgcaacttgattgctggtacgtttttagtaaggaccatgctgtagacttctttgatctttcccaccctgtagtttttggcacacggtagaaggtaagcaggtctcccttgaatgaatggcactgaattcattttgagcttagaaaagagtggtgccttccgatggggtgcagcatcgcatccaatgagccagagagtgtctccatggcaacctgaaattctccacatcattatctgttctatactctagtatataagttaggtcattttttttttcttgccctgttttgtcactaacagttcactacttcaaatgcatttcattaaaggattatcttggtaataagctatggtatcttagtttccaccagccttctaagttacccttatggatggcagtggctcacaattcctaatataagctccttaatcaatattgttttcatctgcagcataggggcatatttttaaatcctgatatggaggctgagtcacagactctcaccatagcacatgtgggtaagtaacacacctaattttctgaccgtatcagagcagctataatcagagcagtaacctgagatgctaatagcataggtaccatctggaggccacttaacgaacacatttgttagaactctcatctttgcatagaatggagggctcactataatgagtcactgaagattgcctgatgattggcccattttctcctttcgagtgatttctagtgctgtacttccagagcagatcattataaagccagcaggaccaatgggatgtcacccagtgtccagccttgccacgaatcacaaaggcatcccttctgacagcaatacacaagtcagtaggaaaagtaaaattgcttgtcaccattgtgacagttatagaatataatacagcaaaggtactaaaatgagatcttatctgagtgttcaaatagattttccatctaatcttctattttttttttaacatggaaaacctagagttttcatttttcatttgtgtaataaaattcttcccattgtttcccacagtgatggtattttatgatgacacatgagcaaacctaataaaagtttaattaaacaccataaatggaactaactgtgaatcatgggctcttcagaaacggggcttgagtgatctgaaagccagagcttagctgcatgcatcttcattatgagagctctctccaacaaaagcattctgagcacttgatccaaatagaatgttttcttttcttctcttccccctcccaccacccccccccccccacctagaaacacacggtcttggttctcagcagcatcagggtttgagctacccccatatttcttctggcatgggaatattaaagcaaccttgctttttgttctcctttgtggccgggatagagttgaatggtctcccacggagagcctggcagactcctttctgtaattcctacctctgtgaaatgccgccctcagtagagccagcctgttttgtgaaaactggcagggatgagagctcaatgtgtttgaacaacaagttcctcggcgcggcagaaattggatgattttcttagggaagttgaaatccaaatcagacaaataggcaactgcataccaaatgaattcatcatctgctatccgatatgtcagcttgtcatctgataagccccagaggtgttaatatgtcccaagctttgaggagaatgcataagaaattaagtaattatttttaatacacagagtcagtgaagactatggatgagggcacttcagagtcagccactccaggatgctggcactgcctttataggcacttccccacagatccaggtagattgcatttgggtagcaaggattcaaacacagcttttatttccacaactttgatgtcggctggggctcagagtccctggaaccgggcttctcccaggcacaagcggtcattcactgtttcttcaggccacaggactgcttccctctcagccggccacagaaggcagggtttgctctgcaggacgctcaggctaagtggggcgggtgttgaatcaaaagtaactttctgttgaaatgggaaattatcaatctgatggttgtttttctctgagtgtgacatttaaaataatcttacaaaaccctaaagatgattggacagctgagatttcaatccaggagatctgaatgtccttgtctccgcaccctgtcccccgcacccctttgcaaatcctacttcatttctttctctctctctctcactcactcttactctctcactctgttttggttagaacaaaagaagctcctggccttgagacagggatttcataatgggagaaattccatatgaagaccaataaaggcttaatgattaatcaggaaaacaaaaaggtagggtccctgctttgaaaggactaggagaggagaccctcaagagaacatgcccactgcaagcccctggtgggggagcgccttcccagctgcaatttcgcctactcaaggatcttaattggtgtcctttgactaaatcatgctgctagggattcaaccttttacaatatgcgagtattcccatcctctataaaattaaaatcctttagctctgagactgctgtgcaagtacattacaaatgtcaagtccctcttccttcctcccggccacatttcacatgccatggccttcagcgcctggcgtctatagtcagtctttcctcactgtcgggaggttcaggtagccgggctcctgttacgggcaccatggggacagaagggacgtttggtggtttggctgaatgtgctgattgtgactgacttttccatgtgacatacaggcagcagccagcacttcctccagggagcggcaggcagccctggcacctggggttctctggcttcctagcacagcagaacggtgggcaggatggaggaggtggttttccagccaagcatctcaccaccacttagccctgttcaggacttctgtacggaggccttcatgacacagttgttctctctcaattttccccagccaagaattcccctgtcactaattatgataccaagtaacttacagctcatggctttgcactaataagatcagtttctaggcctcaagttgaatcaagtgttgtcattcattgacacaaattcttacagatccgttttttaaacaaaagtttgataaccacactagtgtcaccttaatactgtggctgtcaagtagtgaatgttgtgcgtttgcttaatgtcaggggaggaggtgaggtcacactgccaccaatatgagcccacaacatacaaaggacaggctgacctgattacatttttaaaaataaatgttattcttctcagttctgtctgtatcccaaaggaactaactggtgcctgtttacaggcattatagggattacaggcacatgctaacacgcccggctgattttttggtaagtaacctaggaaaacgggcttggaaacccattaatttacattcacctgcatgtagattccttatagtcatagaaaaaaaaaattgcaggcactcttccctgggaatgtaatttataattcagctgggttcattcaacacttgttattgagagcctactggcttcagctgttgtctgaatcccatgtttattcaaccattaacaagtatttataatacaaagagatgagtttacttttttaaaaaagctgcatgatgcggctttaaaaattaaatgacagtgtggcatctgttactttttggatcactgtaactggatttccatcaactcgaaatcactccagtgttaattatctagtcttttcttccactggtggcctctctttggtcatttcactgcttgtttttacaaatggctgaagttcactcttcaccctcggtgaagagaagtcaagggaggtgacagggctgaggtcttcctctgtcactgaggctgctggtggggaagctggcacagaatggaggtgggcaggaaggaggccgagaattaaatttagtaatcctaggaaaccttcctggagaggtcatcatgtgcctctctctcccctgaagaactgagaattaattaatcattatacttcagctcttgtgcctgtacttggcacttagtaagtgctccatatgtaccaaaaggaacctgggagacgttttgcacaattttaggtgacattctagcccagtgatctcttgaaggttgcttatttttactgcttaaaggaagagacgatgcctatttttgcttttttttctttaagatggagtttcactcttgttgcccagattggagtgcaatggcatgatctcggctcactgcaacctccgcttcctgggttcaagtgattctcctgcctcagcctcctgagtagctgggattacaggtgcctggctaattttttttttttttttttgtatttttagtagagatggggtttcactgtgttggccaggctcgtctcaagctcctgacctcaagtgatccacccacctcggctcccccaagtgctgggattacaggcatgagccaccgcgcctggcctatttttgcttttcaagcttgaagaatctttccacaactttcttagttcgatggttgagtggctgtttgagttgcatgtttattttactgttatggatttcaaatcagttgggacatatggcaattggaatgcgacatctatctctccatatgatggatatgtaacagtgtttttttattctattatatctatatccataaaaggagaaacagtttcattgtagctgtcagccaggaaaattatacacattgctaatgggaagaacaaatgataacagcctctttgttgacaccaatagtgacaagattatattagtttcagccatagcagattaagaaacatttcctcttataaaaagtccaagggctgccagccacggtggctcacgcctataatcctgcactttgggaggctggggtgggagggttgtttgaggccaggagttcgagaccagcctggacaacatagtgagacatgattttttttttttttgagacacagtctcgctgttgcccaggctgaagagtggtagcacgatctcagcttactgcagcctccacctcccaggttcaagcaattctctgcctcagcctccggagtagctgagattacaggtgcctgccaccacacctggctaattgttgtatttttagtagagacaagatttcaccatcttggccaggctggtcttgaactcctgacctagtgattcacctgccccagtctcccaaagtgctgggattacaggtgtgagccactgcgcccagccgtgagacgctttttctacaaaaaaaaaaaaaaaaatttaactgggtgtggtagcatgcatctgtagacccagctactcaggaggctgaggcaagaagatagcgtaagcccaggagtttgaggctgcactgagccatgctcataccactgcactctagcctgcgtgacagggcaagaccctgtctcaaaaaaaaaaaaaaaaaaaaagtccaagtacctgtagatcaaagtacaatcatttagttgttgctgtttctgacctagctttctggttcatacactggaaaattccttgcattttaatatgacatatgtgtttgtattttgtgtgtatataccatgctctcaaaaccacccactgcaagtatgcggtggtgtgagtacctcagggtctaatgctccttctgtttgatcatgttgttgggttatgacttccaaatgcaaatttctatgttatccttatatacaattttaatctcttctttttacaaatggctgaagttcacatgaacaatttatatcactgaaccctaattataaatgtagttggccacctgactgtactcccactccatgccctccctggggggttaatcaccacctacctccctggctgcttggcaaaggcgatgaagacagtgagaggaagcggggtggtgagggccaggagtgtgtgtggggtgggacgcagctgccaccacaggaagagaagaaacacacatgccctcctgggctgccctcaagccttcctaaacccagttaccttggaatgtgttcatttaacaaaacaaacaacaaatgtggatttggctttcacccccaaaaccctgtgccctaattagcttacaggagttcatgcaatacttgaagactaaaacttagtattttaaatttcccagggaattgtacagaggtgaataaatagatcatgccgagactccgggtggcagttagggatggaggagcggggcggacgatgaggctggagtagccacccctgcatggtgctttctgtgctccatgtgacaccccttaggagacggcatttaatggatcctaggagggccccgctgagcgagctgtggcatttgtcactgggactcttggacatgtagagccattttattttccagtgtccagtggggttagtggtttgtagtctgctcctcagctggactggaagccctcagagggcagaagtgcctatttctgctgctgctccaccccagagctgaatttttccttgttcacccagccatgtatttgacgcccgtaggactgctaaagctgaaaagaggattcttctgccttccaggcttgtccttgacacatacattttccctacgagccgaaataattttcagcatcattttatcatttctcatttgtcattttcagcctctcgagagcattccaggatgttgtttttattcatcttctcctcttgtttttcctccttttaaaatgatgctgggaatggaagttatacttgtgtgaaactgaaagtgctagaattgggtgaaggatgatggcatttttcttcctatataagaatcatttatactatgataaagaatatagcagttggaggaaaaaagctttcaggagtaaaacactattattcattgcctattataatttacaaaaacaacaatgcttctctttctagtagcataaaaccgccaacagcccaagtacaagtgcttagaagtgtaagactcattaatgctatttgcctttgttttttgatgtcctggatccaaccccattagcactgattattccgtctacccaaaaaccccaccaggactcaggcgtgcactcaaaattaaggctccaattccattcaagagggacatttaaatgaccaagtcccaggggaaaaaaaggccgcactgtagctgaaggtggccacaccaaggtgcccatgccccttccacctgagcagcttctgttctgtcttgcccctcaccacatttaaaagcgtctgaacttacatatcatcgaagacaagtttctgcctcttgcagtccctgtggccgttggagcctggagaccacggcttcgtctgcggccgtgacttgtggaggggaatgttttcagaattgttgtgagctgctttctaaacaacaaacaacacacatctttgagaaattggccacctggtgaagcgagcagcccatcacatacatacatacgtagaatatctttggctctacagaacatctttgtgtgctgtattagaattgatggtgattttgtctcaataaagaaatacatgcattctaggtatttgctgagggcttctacctgtgttctcaactgtcattcttatgacactatcaaaagggaagtcatgacgcctactctcacagatccagaaacaggcttggtgaggttcagcaagttgcccacactcagtgactgtggtggaggccaggggttagggtttagatgcccacttttcccagtccgctagactggaggctggccagttcagtcttcatcagcatcctccagggggctggtgaaaacacagattgccaggccccaccctgagagtctgggattcagcagggctggggtggggacctagaatctgcctttccatctggttcccggtgatgcggatgctgtaatcacccatgatcctggaaccacgctttcagaaccattcactcatctcaacagtcaaccagtcactcatctcacaggtttgctggttcttgttggctgtctgtgaagaccagaaggagtcaacaggaatcactaggaattacttaaaaaataaatcgactgggcacggtgtctcacacctgtaatcccagcactttgggaggctgaggcagggagatcacctgaggtcaggagttcgaggccagactgaccaacatggtgaaactccgtctctactaaaaatacaaaattagctagacgtggtgatacatgcctgcaatcccagctactcgggaggctgaggcaggagaatcgcttgaaacctggaggcagaggttgcggtgagccgagaccatgccattgcactccagcctgggcaacaagagtgaaactccgtctcaaaaaaaaaaaaaaataaataaataaattctaggccaggcatggtggctcacacctgtaatcccagcactttgggaggccaaggcaggtagattacctgaggtcaggagttcaagaccagcctggccaacatggcaaaaccctgtctctactaaaaatacaaaatttagccaggcgtggtggtaggtgcctgtaatcccagctactcaggaggctgaggcaggagaatcgtttgaacctgggaggtggaggttgcagtgagccaagactgcaccattgcactccagcctggacaagaacaaaactgcatctcaaatatatatgtatacatatgtgtgtgtgtatatatatatatatggaacacactagtctgtggaaaagttttaaaaatcacattacttgggatacagacatttacatggcacctattgtgtgccaaacacatggatcataaaacaatgtcagtggttaggaaatgcaaatggtttctctgaagtaattaaattgagtgtatacaaatgcttctttaaatagggactgcttttacgtgtagcactgtaagggttagagtctactgtcatagaagaccaggaagctcagatgtcaacattttaaaattgttcttaaactcctccagtggcctctgcttgctcttggtaaaaggagcgatcccagccaagtggcccctcagccattctttgcctgtggcctctgttccccagattcatgagcgtgtgcagttctttctcgggacctctgcacttgctgcttcctctgcctgtaatgctctttgtctcttagtatatggtgacttgccttttagagatctcgcatcaggggtcagccatctatggccagggagtcaaatctggccctttttttaaaataaagttttactgtaaaccaatcctgcctatgtatttatctactgtctgctttcctgctacaacagcagagttgagtagctgggatggagactgtgcagcccataaacccttaaattatttatctgactctttacagcagcagttctcaactggggcaagttgacaatgcccggagacatttttagttgtcaccactgcgagtgggtgctcatagcatctactgggtggaggccagggatgctgccaaacatcctacgttgcacaggacagccccaccacaagtaattactcagtccaaaatgtgaaaacctgcttcgcagaggccgggcgcggtggctcatgcctgtaatcccagcactttgggaggctgaggcgggcagatcacgaggtcaggagatcgagaccatcctggctaacatggtgaaaacccgtctctactaaaaaaatacaaaaaattagccctgggcgtggtggccggcgcctgtagtcccagctactcgggaggctgaggcagaagaatggcgtgaacctaggaggtggagcttgcagtgagccgaggtcgcgccactgcattccagtctgggtgacagagcgagactccgtctcaaaaaaaacccaaaaaacctgctttgcagaaagtttgccactcctaggactaattcaagctgctttgttataagagctcctagttctttgtgagttccctttttagtactgaaaccattggtggtgaatcatgcatgtgtgtgatcccctgtataaggctctctccctagaactgtaagcttcatgggggcacaaatgggatccgctggattgttattgcatctctggtgctcagcacagtgcccagcacgtaataagtacttaccgaatgagcacctcttcggtgaaaaataactaaataaaatctacaattggtttatagttctctgcgtatcatagttgctcatgatataaggatatagagggaaataaaaaaacttgagttggtggctttttgttccatgtttttctaatataggtcttccccaattctttcagtctagaattaaagaccactgctcccaagtgagggtgcacaaaaaaggttcatttcctgaggatgctgtaagatttaggctctcgtgggaacttccagcaacttgtaataatctttaattcatgggataaagtgttacacactgctccctccctcatctttctcatctttctttgcagaatcctgttcttttttttttttttgagacagagtctcgctctgtcacccaggctgcagtgcagtggtgcaatctcggctcactgtaacctccacctcccaggttcaagcgattctcctgcttcagcctcctgagtagctgagattacaggcatgtgccaccacgcttggccacccagctggttgtgataggcacagtgattatgacaggggagggtttggaagtaactaatgttcctgaaaggatgagtggtccaggaccactggctgttagaggctggcatggcagtgaagaggaactaacatgtagtgttagttgcttaggcgtccctaggtgttggagtttttttttttttttttttgagacagagtcttgctgtgtcgcccaggctggagtgcagtgccgagatctcagctcactgcaacctccacctcccaggttcaagcaattctactacctcagcctcctgaatagctgggactacaggcgcctgccaccacgctaggctaatttttgtattttcagtatagatggggtttcaccatgttggccaggctggtcttgaactcctgacctcaggcgatccgcccgccgcagcctcccaaagtgctgggattacaggcatgagccaccacgcccggtcggggtcttttcatgatattgtctcttttaagtcttatcactaccattttgcaggtaaagaaacaggagcagagagattaagcaactggcccaagatcacactgcagctaagaggtgaggtcagattgtgaacccaagtcccctgctcttcccctggggcgtgctggaatcacccgagatcactggaaaaggggtggtggtgggggtcccccactgcagctgcgacactggccaataagggcagagtgggggccctgtagctttcagtgtggggtttcaatcccagatttaactctgccctgggataagaaatttttcccaacagaaagattggttggttcaaactcctaatttactttgtcccgggatggtattactttgaggtcttttcttttcagaaggaaaaataaaatcttgcctaagcaaccgagggttagaactctccctcagggttcttcttccccgctctctgttgggacagtgaagggggctgtcctctgttgggtcttcctagaagcgggaggcattcaggaattctcaagggacctcaagcatgtgttcagactgtgctaggttagagacagagcttgggggtgctcaatttcattttggttttaattgggaaaggaagagcatcaacaaaccgtgaggtctccgccgtgaggctgcagctggctgtcggccttaggctttttgctggaagaggctgaagtaaacaaactgttgccattaggtcggctggaagaagttaagtcctcgctggtgtatttgtgtttagatgcatcagagaggggtgagatgggcgaccgaagcattttttcatttttatttattggtattgccacactgaaaaaggaaattacggtaatggaatgttacagagtcagcacagggaaaggtaaatgttttcatatgacccaaaccacccaactgggacctgttggtaggagaagcttattgggaattattataccaggaaacaagttaatggcattaggatcataacaaacaataagcaaatctcactcactctttcttttctcttcccatcaggatgagtagtaattctggagccagcaccaaagtacacgactaagactaataacaccttcattttccaagtcctttatccaaggatctcaaaatacccaacaaacaacttactgttttcctaacaagcataaggagcaagcagtgggaaagtcaatcaacaacaataaatgaattctacatttctgtctttttttgagacgggatctggctctgctgcccaggctggagagcagtggcaggatcttggctcactgtagccctaacctcctgggctcaggcaatcctcccacttcagcctcctgagtagcagggactacaggtatgcatcaccacaccgggctaatttttcatattttttgtagagatagggtttcaccatgttgcccaagctggtctcgaactcctggattcaaggtgcctcggcctcccaaagtgctgggattacagacatgagccatcgtgcccagccaaattctacacttctttttattttttatttttttgagatggagtttcgctcttgtcacccaggctggagtgcaatggcacaatcttggctcactgcagcctctgcctcctgggttcaagtgattttcctgcctcagcctcccgaggactcccgagtagctgggattacaggtgcctgccaccacatccagctactttttgtatttttagtagagacggggtttcaccatgtcagccaggctggtcttgaacttctaatctcaggtgatccacctgcctcggcctcccaaagtgctgggattacaggcgtgagctaccgtgcccagtccatattccacatttctaaaaagacttttgctatctcatctgagcttgtactaaatataatatagaaaaataataaaaccagagaacaacctgcaatatgtgaagccaattcttaatatctgagtttatgacttaaccagggattgatcagattaaacctagaatataaaaacggtgagtaggaggccgggtgtggtggctcacgcctgtaatcccagcactttgggaggccaaggtgggcgtatcacttgaggtcgggagttcgagaccagcctggccaacacggtgaaaccccctctctgctaaaaatacaaaaattagccgggtgtggtggcgcatgcctgtaatcccagctactcagctcaggaggctgaggcaggagaatcgcttgggagaggtggacgttgcagtgaggcgagattgcgccactgcactccagcatgggcgacagaataagactccgtctccaaaataaatacataaataaataaaataataaataaaaatggtgagtagaagttacagtttctgattcctaactccttattttaccttcaaaactactgtctgtgcttgaatgtaacattctccaaaatcaaccatcagtgaagagggattcacttatatctgagtttgcaatgtatattatattgttaggcctctattacttaaaagtattgtttggggaagacagattagtttgaaataaactcagtcatcactaatttaggatacttccagaggtcacctggtagagtcagttaaaaaatggtaaagccatctaacaaagatttactcattattcttggggttgggatctcttaattgcacgtgttggttatcaccgcaaagaagccactaaagtcacttcgaaaagcaatttccttagctggtggtcacagtggagaaattacaaacacagacctctagaacaaatgacaaaaccaaggttctgaatgttatgcaaatggatacatgtggggatagcatttctggtgaaaagcactgttccaaaagcacggtgtgtctaacaacatagaggctgtgtcacgcaaaagtgctttgggagaatcaaaagttgctcatctagtgatggctaagatgctgatgctgaagataatgcgaacagcctgattataattgtttctcgaaatgtgagtgaagaaagaccttttcctcagtctctattatttgacatactttatgatttttacagtgcatggaaaacaaaactgtgacattaaatattatcatggatatcatgattgcctgtttttcatcactgcaagtttatatatatattcaagttggccaaagaaactttctttggagctcttctttgaaattggcaatccccttctcttggactgctgtacagcactggtaaaacttgatagtagtaatcacaattccagaggtacacagaccacctttctcagaatgtactctaagcattttatatgcattgtgtcaccacttaacagcaacaaaaccatcagaactaagaggctcttccaggctaagtctctagagcaagagttttttaacctggggtccaataacttgaatagagaagtgacctcttcattttcactaacctctcactgtaacagaacatttccttcaactatgagtaaaggtatgaaaccagagtcatggtttagcaggagcagtagtacaacacttgagaccgtgtcaccggtataaatcacagctattttctttttttctttttcttttcttttttgagatggaacctctctgtcgcccaggctggagtgccatggcacaatctcggctccctgcaacctctgcctcccgggtttgagcgattctctggcctcagcctcccaagtagctgggactacaggagtgtgccaccacacccagctaatttttttatatttttagtagatacggggtttcaccatattggccaggctggtcttgaactcctgaccttgtgatccgcccgcctcagcctcccaaagtgctgggattacaggcgtgagccaccgcacccggccaaatcacagctattttcatatcatattgcagttgtgcatacatacggtttatattcctcactgcttagaaattctggaagccaccagatcagctagaaaggttatttagtgcattaacaagcactaaaggatatcacacatttaaaaatatttggggactacattttccccatttcccctttcccaatattttgggctggcatccaccctgcaaagaggaccgaggagtgggcagcatgcaggggcagccctccctcctgctcagacccacaggagccctcgcctttcaaggtgattccggcgctgcagtgtgcctgtgtgtgtgcaccctcaccctccagttccctcgccaagttttagcactgctctacatcttttcctaacctttcagtttacatttttatgtgttgtgccgagacattcatctctcttcaaaattctatgtatacggtcagggagggtgaggagtgtcttagagaggaaaagtggtttccgtgctgtggtatttcaaaatggaaagagcttctacgactgatgataagctacttgtttctaataaatacctgggatcttgctttgcttgtaagccattcatcacagaggggagtcagtgctggatgcgtccatctggaacctcttgagaggagtgtgtgggtggccatttaaccttgggagcacggacccttctaaggccacaattttagtctatatccaattaattgctttaggtgctacacatggagattcagcttgaagtgtgtatttcttcgtctgtgtaataagcttagtgttcttaggagtttagcggttaccattaaaatattgattagaaattcagttattaagtttttttgggggaagggcatgtcttggggagtgcagagctgtgtgtaactagtatctggtctttggttatggagaagaaccttgcgtgagtatctggagctataatgtgtggcacatgtgtagccataataataagatttgggttaaaggagggaagcaagtctgcagaccttgaccagagtagtcctcaaaaagcctgaccctcctccaacatagcaggtgactttcagacccagagatctctccagctcacttccactttggagggaatgcacgtacctgttgatgttcatgttgcagtggtttgcagacaaagtattactggtggaggtggccagtcttgaagagctgtctttctctccctgggacttcttgatctccctgtagtcgtcttcgttgtcacactgtatgggaataaactaaagtcaatcagcactggatttcaagaggtattatgagttcccaggcaccgacttccacagagcaaggcctcctgggagccccactcacctggcttccccgaagcacagcctgagcagctgtgcccctgccatagcttccccattagctcctcaacaagcaaggatgaaatctgtcagttttacaattgacagctgatggagaggagaggcacgacgccatgattcaacattttgaattctgaaagctgctctgccatcaaccggcttaggatttagccctccaactggtctgagttcccactgcagctccagcggcactcaccttggcatttcttggtatcagaataaagtacagcaagtgtgtgttctctgggattcatgccataagggcagtggcaagcctggacttttctgttttaaaaattcttgctttggccaggtgcggtggctcatgcctgtaatcccagcactttgggaggccgaggcaggcgaatcacgaggtcaggagatcaacaccatcctggccaacatggtgaaaccccatctctactaaaatacaaaaaattagccaggtgtggtggtgcacgcctgtagtcccagctacttgggaggctgaggcaggagaatcgcttgaacctgggaggcagagatttaagtgagctgagatcacgccactgcactccagcctggtgacagagtgagactccgtctcaaaaaaaaaaaaaaaaattattgccttttgtgaactgcaagcagaagctattatctcttggtgccttaattctagttttcaattactatcccatgacatcttagaatccataaagtacctttttctaaaacagtactttgattggatccttgttgccatgattgggtttaattttatttgtttatttagagacagtcttgctctgtcacccaggctggagtgcagtggtgcgatcatggctcactgcagcctcgacctcccaggctcaggtgatcctcccgcctcagccttccaagtagctgggaatgcaagtgtgtgccaccatgcctggctaattttttgtattttttgtagagacggggctttgccatgttgctcaggctgatctcaaactcctgggctcaagcgatcctcccaccttggcctcccaaagtgctgggattacaggtgtcagctatcaggccagcctgtgtttaactttagatatgtgttaaggtgcaacacaaatatattcagaaagtaccattttccatgagataacaggaacctagtatggtatcctcagggctgtctgcattgttttccaggagacaagtgccaacaccaaagagagaaagactctgactttctcgctctggctgggattttgccacacagcctctgccacaggggctcccagatgcccacactgtaatagtacccccatggagggcccaaaccaaagctccgagttcttagtccttagctccagggctccagcagggcgagactccacaaatttgacagccaggtctatggggtcccatctccagcacccagtactggggtactaatgcccagaataccaagtaaagagcactataagaatgttctttcacttctcttgtgtctgtgtttaatgattctttagattttatgagtacagccaggtgtcaggcttactgtaaatgaagcttcttaagttaaaataaaaatggccataagtaatacaactatttaaacacagaatattacggaattttatgtaagtctttctgcacatctctctagtaaactctgcatgcctggatggctttatgtatttccaatctgtctatatattaccaatgtctatctctgcatatttcatgtgtatatttccatcagcgtattcagttagccatccatcccagaggtaatagccacactcattcccagatgattaactgattgattgattcctacactcaacaaagactgagcaccagcaagtagtaaggaagacagggtgtgtagagaaaaacaggaggaatagcaggtagggaagaaaatgagctgccaagtattactgagttgcattgttggaacatattgtgtgaatctgacaacacccctgcaaagatgtcaacatttttttttttttttttttttttgagacagagtctcactctattgccaggctggagtgcaatggcatgatctcagctcagtgcagcctctgcctccagggttcaagcgattctcctgcctcagcctcctgagtagctgggattacaggcacgcgccaccacgcccagctatttttgtatttttagtagagacagggtttcaccatgttggccaggatggtctcgatctcttgatctcgtgatctgcccaccttggcctcccaaagtgctgtgattataggagtaagccaccacggccggcccagatgtcagcattttctagatggagaaactgatgttcagagaaagtaaggtcacctgattaaggtcactgaggaggccaaggaccataaataaccttctgggtctagcgcaaaatgaaaacgctgggccctttgttcaaaaagcaggaaaagagtgatgttataaagccctcaaatagaaaacattctccattctttcacagtctctgtcatggaggtgtctacagtatttgctatacacactgtacttctttgggcatggggatacttggggaggcaagtgtagcctctcaagggctctgtctgcccttggacaaggtatatgtgtgcagcccaccagtgtgggcgttccccttctgccaatcagaggccctacctgtggtgcccgagttgtcaggcatttccccaacaacccacagcaagtgggcaacccccaggggatttcaagaccctctttggaatgtcttactacctggatgagggatgggcaagattcttcctctgcctgcacctaggccccttcttggggcaagggcagcaatagtccctggactaagacaggaagtgggaggctgcctagggcccagggtgccaggaggcagaagcgcaggcagaacctgccctgcagaaacaggcaggaggtgggaacacagtgagtcaaagctccatatgcccctgcacatgtaccatcaatttgcagcatcacaaattcaaagattacaggaaaaattttaagatggcagccacaagcattcaattccaaggggccctgggtgatgcacaccactatggtcccatgcatggggcccatgaaaagctggacctgcaggagggaaacggtaaagacaggatttgaagtcaggacactttggtgtgaaaatccacacactttccattatatgtgagcactctcagggcaatggggaccaactaagggcgcccactgccggctaataatggccagtgctgggtggaaactatgttggggcctctttataaaattatctttgctggccacgtgcagtggctcatgcctgtaatcccagcactttaggaggccgaggcaggcggatcacctgaggttgggagttcgagaccagcctgaccaacaatggtgaaaccccgtctgtactaaaaataccaaattagccaggcatggtggcacatgcctgtaatccaagctactcgggaggctgaggcaggagaatcacttgaacccaggaggcggaggttgtggtgagccaagatggtggagcatcattgcactccagcctgggcaacaagagcgaaactctgtctcaaaaaaaaaaaaaaaaatttttttttctttgcatccataccaaggaaaagcaaaaagctgccccttgaacatatttcttttcatgaactttcttgcaagggcttcaaattctactttatagggataaattacttaatgttattaatattatgtgaagaaaaacatcctttggtactttattttttattttatttatttatttctttgagatggcgtcttgctctgttgcctaggctggagtgcagtggcatgatcttggctcactgcaacctccgcctcccaggttcaagtgattctcctgtctcagctgcctgagtagctgggactacaggtgtgcaccatcatgtctggctaattttttgtattttagtagagatgggattttaccatgttgtccaggctggtcttgaactcctgagctcaggcaatccgcccatctcagcctcccaaagtgctaggattagaggcttgagccaccgtacccggtctggtactttagaatgaatttctctggtcataggtgcccttaggttacaaagatgattgtcataaaaaggagactgagtgccttctccatgcgcacttacaaagcaagaaatatattcatcgtggccaggacaaggtaacaagctgtactccttagtccccttctcaatcagggattcgaaatagctgtgaaacgtatgtgtccagtctaacttttctattgatagactagactgtcttcagaaaactggaaaatatacagacctcagactgatttcttattgtgacgctctgaagccagacagcctgggttaattcctggctcagccccttaggacctatgtaaccttgggcaagttgctttaggctctctgagcctctgttccctctccgtaaaatgggtatgacaatatttgcctcataaagttataaggatgaaatgatttaacatgtataaagtgcctagagcagcatctgtcatggggacctatatacctgtgagctgttgttactgaaaactttgtcctaaatttggagccatccatgcatattgcaatcttggtctgtcacccattgtatttttcacagtgataaaaattacttatgaagatacagtaacaggaggggttaaaaaccctcaaaattggctttaatggatgattaaggtattcccctgcacaaaaaccttcgaaatgggctacacgttcaggctctgctgccagagatgccccccagctctccctgtccttgcttttgctgcccttctcactccctggactcaccgcttccattcctgaccctggacgtattcaaatatccctcctctacagagccctgttttcagggcccctccaccatgaagccctccttgatcaatgctaacagaagcaacagctgctggttctgatgctgcatcagggtctgccgtattcattttcacctgccacaaccttgaacttcatgaggccactggcctcttgggccaatgagtgatcccaccatcaatgtcaccccattcctgccagcaaagagtgagggttctcatgtgtttagctttctcacaggccctacatccagctgcgtgtgcacacgcttgataaatatttcctattttgacatgcagtgggacaaggcttaattacctataactataaaatagggataataggctgggcgtggtggctcatgcctgtaatcccagcactttgggaggctgaggcaggcagatcacttgaggtcaggagttcgagaccagcccggccaacatggtgaaaccctgtctttactaaaaatacaaaaaaattagctgggcatggtggtggacacctgtaatcccagatacttgggaggctgaggtaggagaatcgcctgaacctgggaggcagaggttgcagtgaaccgagattgtgccatcgtactcctgcttgggcgacagagtgagactccctcccccccccccaaaaaaagggataataatggtacttccctcactgagcagttctaaggactaagttagatgttaagtgcttacaacagtgtctggatatagaaagtaccctagaagtgtgtgttaggtaaggacacacaaaactcctgcggcagcctaccgtcccaaacagcagcctatgggtgctctatccaagtacccacaagttaagagatagccccttcccctccacgcccccgcaccccagtcagccccaggcctaccttgcgtttcctcttggattttggcaaagccttttctgcaggtgtgtccgaggtgtggctgggcggtgcgctctcagagtccttggtggcaggggcgctcaatacccctggctcctggggcaggtgttctgggatcctggacaggagggtcaggtcgattttgacccagagagacctgatctcatcactgtcctttagaggggagagaagttcgttccggccaaaggggaccagtgtgtagaactgctcctccagctccttggcgatgtcactggtggtcctggcgttgatggagcctacaggggccctaggaccactgcccccgttggcagcggcctccttcagcctctgatcattcccggaggaggcagaggcagccacggtctgtgctttggacagagggtactcctcctgctcggactccaggtcggagtccgaggaggaggatgaagatgacgactctgtctcaatgaactccttggatttggggacgatcctgcttagcccccgcgtgcggcgcttctcgcaggtcacggaggagcgcagctccttgcggtggctcgctctgttgttgccacagggcctggttttggtgggctccggggggaccaccacgctcgtccccagcgcgtccgcggccgcgggctcctcgggccggtggcagttggcgccgtccccggctgaggtcctctcggtgcgcctggtgggcttcttgcccgcggacctccgggcaggcgcgggcgcgttctccgcgggcgcacagggcactgcgggtggcggggcggctgcgctcaccgccacggccacggccgcgggcggggacttctgcttcacgcctttactcccaggggccttgttggctgtccttggcctttgctcctccttgcaagtgctcttgatctccttctctctcaggctgggctggcaaacgtcggggactttcccacagtcctggacgtcctctttcaccgggttgtagtactgattgctctctgacccgtggctttcattttggatcagaataggaggcttgtggggattaactttgtttagccatttatccagctgccacttgttagaggatgccggttcagcctgaaagcagaaaaccggtgacaaacaaaacatctttcattacaggctcacttaaaaggggcctggctgtttttatcttgacttacttctctaagtatatgagcagaaaacgaatgggctggaagcaaaaggaaaatggaagcattaagcgtgtgtggcagccccatgtggcactcaggatgcctggatgatgctgtccttaccggcccgtggcactaaatgtccttgcagcacttcctctttggaaaaataaggaaagcattgtgtctcattagaacccatttcctagtacttttgagtgttagtataaatttttttatataattatatgtacatatgtaaacttgaaattccccaaaactcagagaattgtttagaggccctgagcataaatcacttgtttttttggtgagacttaaaactttggggagatctgaagggggactaagtggaacctacaatcccaaacaattaacacatgatttatgtgttgaaggcaggtaggctgtagtaatttggtagtaggagcaatgaccttgggaagatggcttgttttgcatatagaactatttcagaggtatttgtgcatctttggcagcctgactgggtcagtctatcctcaacctgcttccatcacactttgctagaaatatttcaaacatggaggtgagatggaacactttcctgcaagcaggtttgctaacttagagcaactcatgaaagtcattggttttgaactgtggccccacaggttggctctgtggttgagggtggggggatggctagggaatgccctgaaatggatgggaaatgtgtagatgcattttgtttctagaagaggtctgtacttttcagttgtgtctctaagaatctatgtctcagaagcaaaaaaaaattaaggaccaatccaataatttcacagggagtaaatgctgatgtctaaaaagtcaatttatccagcattatgataattaagagaaaacaggtgtattgagaagaatagaattttagccagagtattttcaatttgtgactctaagtgaaatggggaaagtattttggctaaggtgatgtgttttttcttccctatggccttccacctttcgaattcgtggcatccattgtttcagaggagaccagataccaggctagagtaagaagacactgcttagctccatacttcaagcttgatcagttcaagtctagagcaaattgggtctgttgccagagaaaaaatggtttaacacaataaataaaaataataaagtttaataaaattttaataaaaataataaatacatttaaataataaaatttgaaaaggttcctttgaagtatcaaggtttgtttttcaacagtgaggcctgtattaagagcagaactcagggctcttggcctcaccccaggcactgaggatttcagaaggggaataagagggctgtatcatagaagcaggggccttggctgagtccgggcacaactcagggaaatgggaagcctctgatgggccagaacgggttggggccaagaggaattggccacagagcgtggggatcaggcaaccagagctatgacagggaccatggacatcttgctggttgccccaaaccagatgggaccaactgccctttggggcagactggcacagggtgtctggtgacttggagaagcaagaaaatttcagtgaaggccagaatgaggatgaaggccccttccctgggctgtgaggatgcggaagcccatcctggagtgcaggtggggaaggggggaccccctggccccgacacagattctggtctttgacgtgacatttttctttgcttgttttcatggccaccaacggaaccggggcaccagagaaatatgcaaatgagtagaaagacagatggtttttgtacctctgagttctgcgtaaatcatgacctcgctttatttggcttctccagagaaagggaacacgggaaacctatggaacatgcccagtgcatgtggcggtggcagatgccctcccatggtcagagaaagcaggacagtgggacacggaacagcttctcggccaagggggatccctcacctcccctgagattagctgagagtgcctgaaaactaatttggtggcaaaaatcaatggcttctaattttgtctccctcaacccccatttctctcatcaagtcagtgccttcgcctgtgcctcagcttccctagacaaatgggacacagtaaacaggaatggatgctgaaggggcctcttgcagaaagggtgcacatattggaagagggcacacacacacacggcagaacacacccctcacactggccccgccactgcgtttcacactagttctccctcactgctaccatccggagccttctatagcccacatctcatatgtgagagaagtctgtttgtagccaaaacacagctgcacacaggaaaattcacactgaaacttcctagcaggagcattaacagaagggcagaatttaatacatttagtacaggcccactgcctggtatgctttagggtcattttttctgcacttcacagctgaggaaatcagtttgaagtacccactttcaacacatcactaaatcatacttttttttccctcaaggatctacaataacctcctattgcctctcaaacaaaatccaaatttctaaggggggcgtttaagggcgtccattatctcgtaatcatctttcattgtcagaatacctacagtttaactcccacttcatgtgtattatctcatttaatctttacagataagaaaggttatcatccctaacttgtagatgaggctcagagaggctaagggacatacccagagctgcacagctaccgggctctacggagactaactttgtactcatctaggtttaaagaccaattgtctccacggctgcatcactgtgtctcccactgtttggcatagcctcgtgaaagggggaccgcattcctttgagaaatgtcagtcttcaacttaaaatgacagaattagatctgaattttggagaaaacaccaagaacactccaaacagtacttgttgccctctgttatactcaattgcgttgtcttttgatgttcgtatttgtttcatgtgtatatatgtcttgtgtcttcaaaaaagccaaatgcttctttcaggcaagggccaggtctctgtttctttagtatcccttgcagcatctatactaggtcagggaggcagattgccacatctctcctcctaataagaacaactcacaatgaggtgtcactcaaattgtaccatttattcctttattatcatcattttccccccgacaacctcacaggttaggcagagcatgattatctgccattctggaaatgaggcaattgtggccaaggaagctgcaaggatacagagtttagtggcagtgaggaggggaacctcaggctgcagacgccaggccactggcatgcggctggccacagtccgcctcctgagccgtccatccggggtttctgcccaaggttctggtttgtttgctggctcactgctttatattttcagccatgactctcctccctaattgatcttccctctgactcacgcaccagctctccatcatgcactctggtccctgcttcatctaaatccttcaagtacccgctgccatggacctcgtaggcacctaataaatgagaagcttgttgagtcagcgagcaacttgaatcacatttctgttgatttttaagaacgatctagggcagcattttccaaaatgtgcttttagctcatctatcccatgaaggagggtttccagagtcagatcaatctgggaaatgccacaatggaaaacacagtacacccgagcaatagtaagggttgcgtgatgattcgataggtaaagaggtggaatcaacctattttgtcccagatctctttaacattaggtatccaggcttttttattttatttttttcctccacgtaatatatattgtacaacaaaggccgagtgagttccgtgtgtggggtcaacatgttagctgagtgcaaaagcaacttctcctgcaaagctctggtataagaggctgtacagtgcctggaaagcagattagactccggtgagaaaaagttgtctgagaccaatgaagcccacatcatgccacagagagggcccctccatgctacgcgggaacatggcattaccatactacagtgatttacgtgaaacaaattggctctcaacacacacagccagaaagaacatctcctacgcaacccagctgagcccagtgggttttctgagtgctgggacatggtggggagaatacagggcgcctcctacgcccatagcaggatgttacagcaggggagtgaggaacagaggcgttctgcttcaaagcagcacaaactggtctgagcagcggaatgtgaggtgcatggctatgaagagcctgactgtcatgtggggttcaggaaaaggagtcttacagctctctgtaaggtgacctgggccagctccgccagaccaggcagcacagctgtggaggacacacagggtgatgttacttcctgcctttgccatttgcagtctgcaaactcattttctttctaaagggtgtgtgtgtctgtattatccttaggaaaagtgttaaaagaactttacttttattccaacaaatacatttctttcctgcagaaagaacgaacgtgcagcctggctaacacatcacctgctgcttctgcagtcctctgtgtagggaagccaggaatccaaaaccacacatagcatcaggtgacttaaacttttaggactgactcctttaggaggctcttgcccctctccttagcgaggggcctctgatagctgctggaagaaatgacaagagcctcctttcatcacccaggagttcaagtctttgtaattatctcagtgacatttagaaagcatttgcttaaagcactttataactgtactgctctttttttctttctttctttttctttgagacggagtctcgctctgtcacccaggctggagtacagtggtgtgatcttggctcactgcaacctccgcctccagggttcaagcgattctcctgcctcaggctcctgaggagccgggattacaggcgcccaccaccacacccagctaatttttgtatttttagtagacacatggttttaccatgttggtcaggctggtcttgaactcctgacctcatgatccacctgttcagcctcccaaagtgctgggattacaggcatgagccactgcgcccggccaactgtactggtcttaaatgaggttccagccaacacaggagctctaggacctacatttcaggatgaaaataagcctgaacattcatgaatttaacctgcaaagccacaaggaggagcctggatggatgatcttcacagacacaaacagtttttggatatcctcactgcctgccctgtccttgcactgtccctgggacgcagttatttcttataactaaatattccagaatttctccacaaagtatagcataaagcaggctttaaagaagcctgcttaactcttctactttatttaactcctgtatttttttcattttgaattatccccattagaatgtcagctctatgaagatagggacattttttgtcatataattgtgtattccagggccaagtactgtgtgactgatgctcagtaaatatttgttgaatgaattctgaatgagtaaatgaatcaatgaatgagtaaatgaaattatgctgaaggaataataatttagtttctgggaaaagccagggttatgttaccataaggctttcataggttaatgttgctaagagccttcccctcatacagagattgatagatggataaatagatggatagatacagatggacagatggagaggcagagactgaacctcatgggaaggagagcgtggagagatggcttggttcaggatgaatggagagtcctgagccagggcagaaaggtgctgaggagaaaatgaggagtgtggggaaacaaaatgtccctgatttcacagtgctcctgcaaaaagctttagcctcctgaaagaagtagggaggggaaaaacctgaaggaactgaagagccactctgtgaacctgagatggaaccactgctttcaggtgtgataacatccaaggcaccgctataaaagctggacacggggatgctgatcgggcccattaaggtgctcccctcccactgagatggtttgtagaagtgggtttagttccatttcagagcctatttaggaatatggcccccccaaatggtacagagggctgtaagtaaaaaattaaacctgacaatcattagtcatgtcaaatgtttacgcactcaagaagaaactctattttactccttgtttagaaattagagtctacccttagagctctgcagcctggggaagtttctctcagccctctcccaagaatcttcatgctctgaattactatttaattttccccttcctactttaaagtagaaacagcaatggtttttattggtaccttctaatgtttttataggaggcacctaaatcttccacatagatactcatcacagctataaaaggtttcatcatttttttagggtgatgctaatttttctttttctattttcacaaagaaaacacagttaagaaggttttattaatatttatagcccttcttcttctgatccgtgacaaaccgcaaaaaggtaagaatctgaccatgtccaacccataaaacccctttccctgtgatttatgggtggtcacacttcccaggcggtgagtggctctgtccagcgactgccctggctgaccccaagggagacctgagccataggttatttcctgtcagtgatgtttatagcatacttggaaatttctggaagtcaagagagaatctgggggcaatgaaagttgatgtttctgtacttcaaaggaacctgtgaaattaggagactgtgaggagggggaaaatgtggagcccgaagcccatagcctcctccttcccagcacctggcttggggtctgcaggagggaggagacctgcagcagtgtgacagtgacaatgcccggacttgctatcctcatagagacagaagtgggcagaggagaggcctgagccaggcagcgcttacctcggggctggagaagtgggggggcttgctgccctcactctcgctggagctgctctcggtctccgagtcagatccggagctgctctctgagtcgctggaggagctgctgctgccgctgctgctgctgctgctgctgcccttgctggaaggcaccgaggttctgcagttgggctgctggaccacggcgctgccagcccgcgaggcccccgggaagcagagggaaggaaagccaagtgagcaaacaggaaaacaccaccaagctgtcatgcaccctaaagagggaggaggcacgcagcctacacatctgtcaaccatgacctggaactcaaagagcaggcatcgaggtcaaagtcatcctaaaggttaaagcaactcatatacagaaataaaattgggggtgaagttggtgccccttggtagtcgggcactggttattcgtgtggccattttggaagggaaggtggtataacatccaaatggctgtttccattttgctgctgttctgggaatggcttttcaaatgcatccccaaatccaatcatctacaaaaatgcaaggaaatccaaaaagcttgaactattttgcaaagcatgaaaatgactgctttatttttgccctagaggaaaatgcagcatgatggcagggattaggcagagggctgtcaggaagggcacggcgttctgctctgagctttcatgacctgctggaaggttccagagacgaagggactgtccaagttcatgtcttgcttcctcccttttcccacctgtagttgagtgctgtagcgattacaggtgctgggatgttgttataaactgtaaccttcctttgagccctttcctagagaactgaagatccctcactgacacactttcgtatattccggactttaaaattcaatcccggtgctgtgacttataggaactgcatttcacatttatacttgatgtttatatccatgctgaaatttgccagaaagtcattacatactcaaagataacaagaaaaattgactgatgctttccgatagtaattaattaaccataaaaattcaaatagcatacatccacccagaaagtgtttgagcagaaaagaaaatttcagtactcacataatattcaacatcttcaaagtcctttattaacaaaattgaaacacaccatactgtgttcttttgaggtcaagctctaaataccaaaaatgccggtcactcttgtatgttgagtcagcaaactgcttccaactgtgaccagtgcttctataggaccgagcatcaatgaaggccaggggccagggagcttgtgggggtttacggtctcaagtgcaaagcagcctggacatggtaaaggacttgtttcacccatcccttaaatctttgatacgtgctttgcccaaagaggactttcataaatcctgggtatgggggtggggatggaggtaatactcattggagctttgtttctataaaaaccaccagacaagaaactgtcttgcaggggatctaaaaataaaagcacctcttggaacggcagggttaggggaaccagagtgtgaacataactttccctagtggggttttcatttcttccaccaatgtcacggtccacactgattgtctgacaaaattcttcagcagcagacaacatctgcacatttatgccttgcctgagctgcagcgatttcttttccagcctgttatttgtgtctagaattgagtgaggaatcctggatcttaagacagagtagggcaaggcacagttagagctcaggggctgtaatatttctttccttccttatgaacaaaaatctgtctttcctgttggctgaatcgagatggttactgtcattggaatcataaaaaaaggacgattgaattctgactgaacatgaacatctgggatccatgttaatagtctgtagaacctgacagaaacaagcaatggggaaaggattccctatttaataaacggtgctgggagaactggctagccatatgcagaagactgaaactggaccccttccttacaccatatacaaaaatcgactcaagatagattatagacttaaatttacaaactaaaactataaaacccttggaagacaacctaggcaataccattcaggacatatgaatgggcaaagatttcacgacaaagacgtcaaaagcaattgcaacaaaagcaaaaattgacaagtgacatctaattaagctaaagagcttctgcacagcaaaagaaactatcaacagagtaaacagacaacctaaagaataggagaaaatttttgcaaactatgcatttgacaaagctctaatatccagtgtttataaggaacttaaacaaatttacaagaaaaaacaatcccattaaaaagtgggaaaaggacataaacaaacacttcaaaagaagacatacatgtggccaaaaagcatatagaaaaaagctcaatatcactgctcatcagagaaatgcaaatcaaaaccacactgagataccatctcacaccagtcagactggctattacgtaaaaatccaaaaataataggtgttggcgaggttgtggagaaaaaggaacccttatacactggtagaagtgtaaattagttcaaccattgtggaagacagtgtggcgattcctcaaagacctaaagatagaaatatcactcaacccagcaatcccattactgggtatatacccaaaggaatatagatcactctatcataaagacacatgcacgcgtatgttcactgcaacactattcacaacagcaaaaacacagaattaactcaaatgcccatcgatgacagactggataaagaaaatgtggtacacatataccatgaaatacaatgcaaccatttaaaaaaaaaagattatgtcctttgcagggacatgaatggagctggaggccattatctttaccaaactaatgcaggaagagaaaaccaaatgccacgtgttctcacttataagtgggagctaaatgatgagaacacatggacactgagaagggaaccacacacactggggcctattggagggtggaggatgggaggaggcagagggtcaggaaaaataactaatgggtacaggcttaatatctgagtgatgaaataatctgtacaacaaacccccatgacacacgtttacctatggaacaaacctgcacatcctgcacaggtgccccttaacttaaaaaaatcgttttttggtagatcccaaaacactcaaaacactggggggaaacactcaaaaataaaaaagcaaaacaacacatggctcaaaagcttccttgttagaaggatggggttgggggacatagatgtggaggaaagatatgtgtttctctgtcaccctctggagtgacatctgccaaagattagcaaatgaagatgaataaagaacattctgattggtgatcaaagccattggacatcatagaaaaccaatcagtatattctatctgctttcactcaacaaaaaacatgcgatgctggttctgtgtgctctgggctttgcgtgtacagcagaggcagcaaggtgtgtgggattccttgtggcttgcaccacaaagtgactgtcttttgaaaactggcactttaatttctgggaaagcgcccattcaacagttaccatgctgcctgcctttaatggctgcggtcctgaagtgatgaggcacactagcccaaggaggcagcatctccgatctgaattacattggcagaaaaaccttatacgttaatgttttcctttcttaaattacgaaattcacttaaaatgacagttttactggcctaactattatttgtttttaaaacagctgagagagccaagagtttaggtttttcttcatactttacttgtaagggttgtgaaatttatgatgtctggattaaatatattcatgtttcaatggtcccggtagagcatgcataatatccagaaacaatcatagcaaagatgggggcagactttcctggaagggcgctggtagctccagttgtgggatcaagatcactctccccacttccacaaaggcaactcctctaacccatccttgcatggggccttggggtcagctgaccattctggcctcagtgtagtgactgctcccaccacgggtgcttgcagctgctttacccatcgtggggcagctgcagcagtgagggtggcagagccaagatgaagaagccaggaatggcattccctgcagacgagtgctagtgaaaggatggactcggctaagccacaaacacacacatatacatacgtctatagaatttgttgttgcccaggctggagtgcagtagtggtcatagctcactgcagcctcgaactcctgggctcaagcaatcatccctcctcagcctcccaagtagctggaactacaggcatgtaccaccatacccggctaatttttgtatttttttttttataaagacaggatctttctatgttgtctaggctagtcttgaactcctggcttcaagcaatccttccacctcagcctcccaaagtgctgggattacaggtatgagccactgcacccagcctaggctttatatatttaaaattgcaaactgaaaattttggtgtgccaattggttgtcatgtttacataccaaagatgctttaaaaaaattaacttaagcctgggcagcatagtgaaaccctgtctctaccaaaaaaacaaattagctgggtgtgctggcatgtgcctgtggtcccagctactcaggaggattacttgagcctgggaggtcaaggctgcagtaaaccatgattgtgccactgcaccccagtctgggtgacagcaaggccctgtaaaaaaaatatatatattatagtggattttttcctgaaatgataacacggattggttgacatgatgacataggcttggacaatttttagcatgctacctaccaagttcttggacccagtgccatctcatgaacacggtgccatttgacagcagccagaaaacattattgagatcatggaataaaagtctttgtgtcaccaaagctcagcacagtgcctggcacataataagcgttcatgtgtgattactaaatgaaaaagtaaagagaaaaaatccaacactgggttaatgagttttttttttaaaaaagagattgaatctttcgagaaggttataatgtcacttttccaattaaaaaatatttaaaagtacttcaggacgggcgcggtggctcacgtctgtaatcccagcactttgggaagccgaggcgggaggatcacgaagtcagatcaagaccatcctggctaacatggtgaaaccccgtctctactaaaaatacaaaaagttagccagacatggtggcaggcacctgtagtcccagctactcaggaggctgaggcaggagaatggtgtgaacccgggaggcggagcttgcagtgagctgagattgcgccactgcactccagcctgggcgacagagcaagactccgtctcacaaaaaaaaaaaaaaaaaaaaaaaagagtacttcagcaacctttaagacagacttcttcccttctgagaatatttctttaaatgtactcaagtttcatctgctataatttaagcacagttccctcttggatggtttgtttactttttgcattttgacttcatgaaatgtttggctggttttgtgagtggtcagagccaaatacacctttgagaggggtccagctttctctaaatgatctgcttggtgtgtttcttcctatggctgtgatgacaccttccttttggaatctggccttggctaagtctgaatgcagatcataaaagaaaagatctggaggctgggtgcagtggctcacgcctgtaatcccagcactttgggaggctgaggcaggcagatcacaaggtcaagagtttgagaccagcccggccaacatagtaaaaccccgtctctactaaaaatacaaaaaattagctgggtgtggtggtgggcgcctataatcccagcaactcgggaggctgaggcaggagaattgcttgaacctgggaggcggaggttacagtgagccgagattgtgccactgcactccagcctgggcgacagtgtgagactctgtctcaaaaaaaaaaaaaagacctggaaccaaaatgacaaaatcttggatctcacagtcaagggtgctcctgcctgccaagtgtattgtggggcctgaatacatatccaaaattgtccacacacttttaactgacaagtaacttggagagaggctctctgcctggttgttgctgtgtggacagctgtggtgcccacatcgcaccacacatgctgtgggcactccactgggattgactgaataacaatgtttgctcctcctcttcaacactctttgagaacacatgcttgatatccaaaccataatcagtgtcctggcaacagtattcctttattaatagcatcactattgatattaattcatctaaaaccataccacatggtaagtgaaaatggtaaatgcgggattgaagaggtttgctattgctaagaattgtcgtctaaaaaaaaacccaactggcaggactgttgcttctatcctgaaatgtaattgtttgttctgcaacacttccaagaatgatttctctatacaacttggcttttgaagctcttcagggtctggtctcaatcagatttccagcttcacctcaatgggtctatccctaaaccttggcaataatacatttctcagcgtctggacaggctgggtctgtttccagcagggtgcccttgcatatgatattttctgtgccagaaagtcctttctccctttttcctttgagttactgttacctcctactccctctgcaggactgagtggctatgtttccctactctgtaaaggttttcccagctcccctaggcatcaatgatgtttcctcctctgagtccctctagcacactgcccacttctctattgcagcccttaccacgttaaggattggaatcatctaatttatccatgcaatgtatttttttctgttcccttgggaatatgcaggagttcttaaaactggtaactttagaatgctatcatttacatacgtatcaggttgaaaattgagaacccacgggggccacgcaagtagcatccatgagtgaagtgttcaggtataagcaaaacaaatgtgtaacattataaatggcagtagaccctcagctccccagccgaggggaaggaaccaaactggagaatcccactaggtcgaatgctgcttctccaggctagcctatctctgtacctggaaacaagagctcattattaccaaatcttttgattttttttcacatgaagccccaaatccttatgtttatatcaaatctcctgattttaaaatgctggtaactaatttgaaaagttttaacaatgaaaagtttcattgtattttagcaatgaaacacatttggtaaagaaaacacacgtgggtaagaagaggcctgtggggcaccattctgagacctctgatctatgtcccattattacatgttttgagatggctcaatataaaatagaaaaatatagagaccacaaccagaagaagttttacccactcaggaatttagactagcagggccagggacaaacaaggggtgaaccaaacactctcacttcctcagcccacctttttttttcttaaagtgaaagcaagtttattaagaaagtaaaggaataaaagaatggctactccatagacagagcagttaccaaacaccattttgtatttttttctttatttttttaaccttaggatttgtttttttaattttttatttccataggtttttgggggggaggggaataggtggcatttggttacatgagtaagctctttagcattgatttatgagattttggtgcacccatcaccctagcagtatgtactgagcccaatttgtagtctttgatccctcactcccctcccacctttcccccaaatccccaaagtccattgtatcattcttatgcctttgcatcctcacagcttagctcccacttaggagtgagaacacacgacgcttgattttccattcctgagtcacttcacttagaataatagtctccagacccatccaggttgctgcaaatgccattaattcattcgttttcatgactgaatagtattccatggtatatatatacaccacattttctttatccacttgttgattgatggatcagtccacttatttaaaaaattctattttgaaataaatacagattcactggaagttgcaagaaaaatagtacagagatcgttcttgtgcccctcacccagttactcccaaggttaaatcttatgtaactacagtacaataccaaaaccagaaaactgacaatggcacaatatacagttccttgtaattttatcacatgtatagattgtcaggcctctgagcccaagcctgcatgtatacatctagatggcctgaggcaataaaaaactgcaaaagaagtgaaacagccagctcctgtcttaactgattgaccaaccttacaacattccatgatgacttgttcctgccctgccccaactgaccgatcgacctcgtgacattcttcttctggacaacgagttccatcatctccccaccatgcaccttgtgacccctcctctgctgagaatagataaccacctttaactgtaactttccactgcttaccagccttgttgctcacacaaagcctgttggtggtctcttcacacggacgcgcttgacatagattcatgtaaccaccaccacgattaaaatgtagaactgtcccatcaccataaagatctccctcatgacacccttttaggagcattcacgccgacctctgccctctaccattcctaatctctggtgaccactcatctgttttccgtctctaaaatgctgtcattttgagaatgttatagaaacagaatcacatagttatgtgttcttttttaaactaaattattgagatacaatttattcatagtaagtgtccttttgagatgggccttttttcagtcgacacaatgtcatgagagccatccatgatttttaatatatccatagcttgtttctttttattgccgggtaggattccatggtacagacctttaaaggttcctctgttttttaaccattcacccaatgagggacattctggctgcttccagttttggactgttaagaataaggctgatatgaatatttctgtataggtttttatgtggatgtaaacgtccatttctctgggacactgcttccgggactttcaaatttgtcttttgtcttcagaattggactctgatgagtctgggtggggatttctttgagttcaccttgtttgggatttgttagcttcttgagtctgtaggtttatgtcttttgtaaaatttggcatttttaaagccattatgagtatgaatactttctggataatttccagcctcactctttctcttgtccttctggaactctgatgacacccacgtaagatcttttcttacagtcctgcaggtccctggggctctgtccttctctaccccccagtctgtttattctctgttgttcctatcaggcaatttctcttgttccatcttcaagttcagtaattcttccctctgttctcttcattctgcggttgagctcatccattgagtttttcaaattttggttatggaatttttcagttataaaatttctatttgccttttccttgtattttctgtattattgtggtgagaccccccctactttttcagttgtctcaagcttgtttttaattgcttactgaagcattttatgatggctgctttaaaatgcttgtcagataattacaacatctgtgttggtctcagtattagcatctgtggattgtcttttctcattcaagttgagattttccaggttcttggtatgatgagtgattttctattgtattctgagcgtttttggtattataataccttgatttttaaaaattattgcttgtttttgcaggcctccactaatgcgatgttggcaggggaagggagggttgtctccctacagttgtgcaaaggtagaagtttaagctccccactcaggctttgctgatggagagggggccacagttttttttccccccacggtgtttgtctggaatagggtggttattgtctacaagtttcccacggtggctcacacctgtaatcccaacacactggggaggccgaggctggtggatcacttgaggtcaggagttcgagagcagcctggccaacatggtaaaaccccatctctactaaaaatacaaaaattagctgggtgtggtggcgcgcgcctgtaatcccagctacttggaaggctgaggcaggagaatcgcttgaacatgaaaggcagaggttgcagtgagctgaggttgcgttactgcactccagcctgggcgacagagtgagatatcatctcaaaaaaaaaaaaatttattcttgctaggatatgaatttcctgaccctttcactacagagaactggctttcctgtggcttccgtctgtgcctactgccaggttgccagcttctccagcatccactctgtgctatacaaggaaaaaaggaaacctggggaagtcaccaccatgtcttttcctcaggcccgaaggcccaagctgatttgccttctccccgcctttcagccttattatgtttgttttatatgtaacatccatggagtttagctgtacttagcaggaggaagaggaaaaagtgcattaacatcttgtcccagaacaggcaaccacccacttggtatttagcaagtagaaaggaaccctctctcaatacttccaacctccagctctagttaattatctcaaaagctgacgaatgaaacaattacaaaagtctctgctatagttcctgcccattttatcacctagtcaaattaggcattaattcattcatttaaaaactgctattatgagaattaagctcagattttacaagggtgtataccaaacctgaaaaggacatgttaccaagaatgtacacagcctcgtgagaaaaatgactcaaatgaaatgaggctgtaaaaatgttaaggatagaaagttgagtgctttaaatgttatgttcatagtgaaacattctctcagtatatctgtgaggtaatgggctttccaggattccagttagctggggacagagaaatggattggaatatctaagtgttgactttgctttttccctgggagaggatagggttttgctgatgctgggttttgctcaagattgagttagagcctcttggggcacctggaatctgagctggtgcacggcacacctgttccagctctgtgggagcacctctgcctcagtcattccgtgaccttgcctaaataagccgaggacctcatctaaactcacagggtgtaagtttgtggtctttccctgccagtgtgtgggctacaaagcagcatgatcacagttatgtaaaaatatacacacagaggaaaaaaatgctggaaggatattcaaatgttaactgtggatatttttggatggtggaattatggggattaaatggtttttgaacttttctgtattttcaaaattctcattttcttttcaccaataaaacacatgacaccattttcaagtctacgtgattgtgggaaatgactattcatgtattactgaatttagcttgctcgcattttatttaggagtttagggggttgatattcacaggggaacttaatatttacatttacatattttacattttgggggagatttttggcaggttttgtatcatgatggttttagcttaaaagtataaattggatagtgttttaccttttcatagtgttctgggaaacgttaagtaatataaaagttatctgttccttgaaagtttaaaataatttgtcaccaataaaaccatctaatctcagaaccttttagaatggcaattctttgatatctttcacaatttattatttggttattggccattaattcttttgtcaatttttgaatttttttcccaaaagatcctatttaatttatattttcaattttattaccacaaaagttatataatgttctcttataataaaagcatggtatctattatattacttctttttaaatttttcctctttcttcattatatttgccaaaagttttctattttcaaagaaacagcttttgattgatataccataataactctagtattttctggctttgctgctacattttcatgttcatttataatacttttacaaacttcttgtgttgaatgcttgtttcagctatgtttactcttccttaataatagcagcctttgcgactatcattctgcctctgagtatacccgtggttgcaggcgatcatccttgttatgttctgtttttattttccttactttctaaatagatcattgaagtagtttttaagtcttgtttgatcaaatagtcatttagaagaatgcttttcaatacctgatgacatttcagtgggataaacattacacttaggtccaaaaataaacaggatgggaatgtataatagcttagcacatgtggaaacctcagtggtcagcagcttcagcccggggcaggaaccttagagctgttttgagccgatttggaaaaggtgagaggagggacaggcagcacagctcattaactctgaaccaggagtgggatgggagtagagaatggcctggggaagggattaggccataaagaagacttatgcaccactgtgatatcccaaagggccctgaaaccttctattggccgtagggaacaataaaagtcaacagaacctgccacatttagcagaggagaaactcagtaatacaggaggtccataaacttggacataaattaagtctcacatttcactgctgatgctattgtagcatctggaactctttcagttacaaaccaaagaattcaaagatcctcctgaccagcccattaggcatttacacagacatatcagggagtgaggtgctgaggcccaacttccaatttaagaacagtgttgagacacaaggcttgatccccaatttgagataccagagagcacagatgtcaccttgtggggtcctagttacttccataaaatgtcatagatgacaataagccattagttcttaaccaggtgctggatcccgtgctctcttgcttagaggggcgctttggcttggggaatctgttctaacactcgaaacatttcttagtttggaattcctgagtttatagcatcactacctgactactgacatttgctaagaaatacaatttcttttgttcagggttcagccctgcttttggatttatcagcttttctttttcagatgggtgaagaaccttctcttgtagatgaaccaagacaaaaaagctattgcttggagctctgggtcatattgggaaccaagttttactttcagttgaataaagacccacgtgtggccccaccaaagataaaggcatttcacaaataaagaaaaaatacaataatgtacagacattcattggttcccaaatattcctgggcttactgatagtttttcagagtataatgtaataatatatttatttaatactaaaagtccatcagagaacagtttctatacagctgtcttctctggacccagggctttgaatggggcagagccctctagcctgtccttcagatggaagtgttcttggagatctgtacatgtcactgggcagcatggaaatggctgccgatctttttatgtacgaacatgaattaggctgggagtccagatggtagagggccctggaggacgccaggcttgtccgctgtaaaaggcttctctgaaagccctgtgttggcttggccaggtcccctctgcaccacacagcttggcaagaccagtttgcagctgcacttcccgcctgtcctgggcactgtttgagagactgtgacaagcggcagctgccttctggtgatacaactcgcctccccactttcaggcgggtggtaccactagagacactgagttgaaaagcccttcttggcccagagagaacctcaagcagggaattcaacatccttcttcgacaactgggatgggagctgccatgtggcctgggcccagccatgagaaagctgagaacatccacttggacaactcctcccctggcagagggagctgaaagcgtggatggagtgactgccatctggtgggcgtgtgggagccagggtgcatgggatgggaggcgctgcctctttggaggctgagatggctggctggcgggtgggatggccgtgccaggggttgggggccattgccctccagctgccaagagtgagcaggctgccccagatgagcgaataacctcagcagtgtttcatctaacctgcttgcaggacacagcttccatatgcttccaacttcctctgtgtgctctccctgccactgcagctgctggatatgggcagggaagctcctactcgatggcttttcaggcaccaggtctatggggaaatgctgggagattctgggctaccagaattgcctgatactctgagcttctttctagccctaatctcagaggttagattcccagggactgcttatagaggtgaaatcatgttgagggcacctctgtaaacccatctgcttcctacctcaatcctggaagagagaggctctactgtgaggaacacctcttttaccccaagcaatgggagcgttttaaggcaatgtaacccattagagatcctgccacccatgcacttatttgtaatagtccttccatttattcatatatattttcagttcgaggaggccttttggatagtgcggcctcaaacttccatcctcatggaaactccataatccatatggcagtaacactctaccagagctctttgactttttttttttaaaaacatctttattaagataaaatttacataccacccctttaaagtatataattcaatgtattttataatcttcataggattgtacaactatcaccatgatctaattttaaaacattttttatcctcatttatcctccttaaaagaaaacagcactttgggaggctgaggcaggtggatcacctgagatcaggagtttgagactagcctgaccaatatggtgaaaccctgtctctactaaaaatacaaaaaaattagctgggtgtggtggtgtgcacctgtagtcccagctactcgggaggctgagacaggagaatcgcttgaacccaggaggtggaggttgcagtgagccgagatcgcgccactgcactccagcctgggtgacagagtgagactgtctcaaaaaaaaagaaaagaaactgtgtacatcagcagtcaattcccattcttcccactccaagctccccttgcccccagccctaagcaagcactaatctccttcctgtagctataaatttgcctattctagacatttcatagacatggaatgatgtaagtatgtggtcttctgtgactgcttctttcacttagtgtaatgttttcaagggtcatctatactgtagcgtgtatcagcactttgctgcttttcctggttgaataatattccattgtatgaatataccacattttgcttatcctttcattagctgatggacgtcggattgtttccattttgggctactatggataatgccactatgagcattcatgtctaagttttgtgcgaacatacgttttcatttctcttgggtatatacataaaagaggaattgctgggtcctttgttaactctaagtttaatcttttgagaactgcaagactattttccaaagcagttgcaccactttgcattcccaccaggagtgcatggggttctaacttctccacatgcttgtcggcaactgttattgtccatctttttcattctgcccatcatagtgggcgtgaagtggtgtctcactgtggttttgatttggatttccccagaggaaaatgatgttgagtatcttttcatgtgcttgttagccatttgcatattttctttggagaatgtgtattcaaatcctttggccttttaaaaacttataattgagttatattaattttctatatattctggatacaagttgtttatctgatatacattgtgcaatgtatatcagtatatatctctgtctgtggtttgtgtttttacttccttgatggtatcatttgctacaacacaaacatttctaattttgcggtagttcaggtaacctgtatttttcttttgtcacttgtccttacttgacttcgcttaatagtaacagatgtttaaatatataggattctttaactgttttcaaggcattttcttttcaagtcccacctctgagcctcacaacaaaccaaaggagtagaaaagtcagctacagttatgtctacagaaggcagagcagaggggtccagtgactcactctaggttgcatatcaggttagtggaggagagaggttgaagcccagatctcgggctcctaatactaccctgtgttctctcaggagtgaaactttcccaacaagtggggataaattaccaggcttctggtcccatttggacacatcaggtcattttgccccgtgaggcaggatggtgcatagtcagacagacccaggtggacgttttactgcctctgctcgctggctatatgacctttgggaagttatttaccctctctgagccttggctacctcgttgacatttaaaggggtaacaaaagtgacaacctcatagtgttgctaggtggtttagatgagaaaatgctcataacattctttttttttttttttttttttttttttttgagacagagtcttgctctgtcacccaggctggagtacagtggcgctatcttggctcactgcaaactccgcctcctgggttcatatgattctccttcctcagcttcctgagtagctgggattacagacactcgccatcatacccagctaatttttgtatttttagtaaagacggagttttgccatgttggccaggctggtctcaaactcctgacctcaggtgatctgcctgccttggcctcccaaagtgctgggatcacaggtgtgagccaccgcacccagcctcataacattcttaacatagtgcctagcacatagcaaatgctcaattaatagttaatattattctttaatttttattaactgtaatgcttcttccaacaaagtagcctaaccagtaagaattcttccagtttacctgcattattaactcacattacccatctggtcattttgcagaattataaatgttttctcaggaaggaattgaagagatcagctagtccaactccccagaaaacggaagtggtgtgtacaagattgcacagcaagtgagttttctaacacgacctctcagaagtctcctcttttgtttccataaacctggctgcttcagtgcaaagctacagatagctctgatcgattcattcattcattcattcattcattcattcattcagagacaggggcttgctatgttggccagggttgtctagaactcctggcctcaaacagttctcccagcttggcctcccaaaatgctcggattacacgtgtgagttaccatgcccggcccagacagctctgattttgaacaaggtcaaaggaagctcccaagagagactgcaaggacccagagagatggcagtgcccagatcttagtctggaatcacatttggctcctgaaaaccctctttctaacccagtctctgtctgaacaaaccaattccatttctctcctgtgtttaaagcaaataaagtgagctctgaatgtcagcagcatgtggtgtttaatttgcatctcaccaaggaatacaagacttaaggatgatgagcgaaaaagatttttatggaaaccaaattacagcatctgagacacaggcttgtggccatatcagctcaagctgtgatcttgttagctgtcataaaccaagctgggtttgttccctgggtgaggacactcagggcaaatgtgtaaaatattactcaggtgtttctgcagggagtgctgttcatccttttcaaaggctgcaccacagagcacagctgatagactgtgtctggtgacagggaacagggaccacaattaaaatgagtgaaaacacagtaagaacatgcatgtctcgccatcagaagcccctaaggaggggcgtgcccgggattgggtaattctgaggctcaggggccttaccaaggacttgggctctgtctgtctttccttactgacacccttggcttgtctttaggtggattcgcctcactcctctgatggctgctgcgattctcacacacagatgacagtgtccagagaaagggatattactgccctgtgtcccttgctaagtagatcacccctcactggcttgaatgtcaccacacgcccatgactaagccagttccacagcaagggtaataaggcaacaaatgctagcttaggccaattaacagtcaccccttaggatggaggacgaccaacctcccctgaagaccctggccactcagagtagagtgacccaaacgggttctctgtgaggaagtgatggatgactgctgagcaggcaatcaatggtgtctccctcatgcagaaggcctgctccagtaatgggatcctgggtattccagacaaaccagattagctagacatctgccccagaccaacaggctggcttggtgggtcatcccaactgagactccgggagagaggcattgggcctaggaacctgcacaccagggctctagtcacagctgtgctgataaccccactgtgggtctcagtgacccacatgaagagatgggcttggactagatgatttctgtggtccgtcacttctaatacccttcgataaatgtatacttaattaaaaagaaaaaaacaggccaggtctggtgactcacacctgtattcccagcactttgcgaggccagggtgggaggatcacttggggccaggagttcgagaccagaatgggcaacatagtgagacccctgtttctgcaaaaccaaaaaaatttgccaggggtggtggtgcacacctgtagtcctaattactcggaggctgaggtggcaggatcacttgagccaaaggagttagaggtttcactgagctatgattgtactactgcattccagcctgagtgacacagtgaggacctgtctccaaaaacaaacaaaaatccccaaagaccctctgaaactttggatatttgtcctgtccaaatcacataatctgagctgcattgttggaggtggggcctagtgggaggtgtttgggtcacgggggaggattgctcatgaatggcttggtgccctcccccaggtaatgagtgagttctcactttattagtttatgcaagagctggctgtttataggagcctggtacctcctcctcttctccctcttcttgtcatgtgacacacctgcttccccttcaccttccaccatgagtgaaagctttctgaggcctcaccagacacagatgctggtgccatgcttccagtactgcctgcagaaccatgagccaaataaatctcttttctttataaattacctggcctcaggtattcctttacagcaatgcaaatagattaacacaccgttttttaaattactatccctagagatgcctaacccgaatttccaactagaagctgtgttaatttctattttaattctttctgttcctcccatttaggctgatgagcaatggcgaggccaagaaaagaccagagaaccctggagccagagtcacagacaattcactcctgctaatcttcagttgactataacaagctgcctggggtttcctccctaaattcgcacacagcattgctgtgtaacagctgagcaagtgacagattcctggctttgctacctctaggagtctagataattctcatcataactaagtctgctatgctgtgctgtgggtagagatttcttaacttgctgtatataaagtggcttcaagggatctgcctgcgacctcgtccacccagagcattttggatttcaggtttaggtgggtgaggatttttctgccatgaagaatggtcggtgctccttgcctgtcactgttgctctgcaaccatatgtgcctggtactgttctgagtgtggtggggacagaaggcacaaggttaatcatgtccttatagttggaggacctagaataatgtttaagagaaaacagtgtatgtcaagcgctcaatgcggccataaaattcctagtcctaattcttagttctaagacttgagaggccagggggaagaacgaggagtagagtttccaggcaggaattcttggaggaagtggggcctgaaacactgagcaggatttgctaggaaaagagagaagggggcaagctccaggcaaagcgggtggaataacaggaggctgggatttgcagggcgagttgtgtgggggaagctgaaatagacgcaggccacggggaggaaccatttatccttccttcaattttatagcatccagcaccaggcagcccttctatttagatatgtgggtgataaggaagagagctgaaaaaacagactgggattgcctggtttcctatagggtgtgaagctgaaattctatgagcaaatctatgtaatttaaataagactacaccaactaggacgtgctgagaacaatacaggaccaggggtctccagccccactttggtacagtcactgctggagtggagggaaaatgagtcgagggtgggtgcgttctcctccaaccatggcaactcattctgaatgcactgcagaggctgtgcccccagaggaccctcagggaggtggtcctgatcgaagatggctcccacgtgcagacgctgagaatgagcccaacccatgagaggcaaattaccacgaacacattttattcaagggaaggaatgtcaaagccaggcctttgtttctttaaggtttgctgaaaatagaaaggttgttttatgggcaggctgagcaaagagagagaaggcagagagggagtggtaagaaaaagaagggggaatgaaataaactagaatgtggtcaatataattttatttgctttattattcctgagtatggtgccaataagtctgagttctgcgactcccagctccaccatcacagagaatgtgagcaatctcgcttccagaaatgagctgcccactaaaaggaaaagaatcaccacatcacagaacaggccaataaaactctcagctcagcccagcctgattggatggagtcctcccagcaggttctgaatgacctgtgcatcagtgctggaggacaaggcaggcctgccgggctgcagcccattctttcattgaactcagaccatggggtcagtggatgcagagtcaggccctggctgggcatgggcacaggcaggacgactcagacatgtactggagacagtccttgccgacagggagctcccggtggaagctctggttcatgtctttgatcagaatgactctgcttcaaacaaaggtagccttgcttttttccactgcagaaaagatgagtgagagagttcccaggagacttttggtggtcgaagggagagaggacaggaggaaggtatttagtcagacttcagagcacacctggcagcacgtgcctccgttaactccaaggagcaaaatgcatttgggacctccaattttttttgttgacctctggttctttttttttttttttttttaacttataagataggcctttcctgatgccaaataagggcaatgatcagcttccccattcctggagccaggacctgccacatcatttgcagtgcaaaatgcaaatgagagccccttgttcaaagagcaagataaaagtgccatcctaggcgctcaaaatacaaaggttcctcctttcttctatggtctgtcaattggtcaaggcattttaatttgctacttaatgtcatgcttgctgggcactggaatactcatgcggtgagtgtaggatcccacgggtatctggaggctcgccctgcaatttagcatgtgcaaggagctccccacctctgccagcccaggatgggcgtgtgatgccctggctggggtgagtgaggttgagccaggtatctctgtgtctcatgggcccaaccgacacgggagagaagacaatccccatggggactgcaacctttgaactgggacacatgaggcctctgggttagggtcggggagaggctcgtccccctgcccagccacccactgcatgtgcccttgtgctgtcagcttggggcaaaacgcgggtgccatgtctgggcctgtgagccctgtcctgacctggcatgcacccatgccctcctggggtgctgggtagcagcagttactgtgtagggtggaacaggcaaggccaggtggggccagggcagcaggctggagctggcagctgagagggacccatgggagccaaggctctgagcccaggcagatgctccatcatcccattggacttcacttaaaaaacacgaattcaaagataaagttattaaggatttcaatatgccaaccacagagcattaaactaagtaagaggccatcggcgtacagggccctgggaggctgcacagttcactgctcctgcctggagccaccgggttgcttctacctttgtcttcctctaaaagaaaatgcccaagccacagctacctccaaggttctggggattgttgccttctgaaggcatccagttcctgccaatcatctacccagctacctatctgcttgaattcccctaggtgcttgctagtagaaaggtggaagaaaatttcccagactatctccaggtaaccaaggaggtgacagtttgggaagcttacagaaagctccatggagacagaattttaaataagctggagtcccatgtaattaaaataattttgaattaaaactaccacttcagtaattgcttttatattataatatttactaccattgccattgtgtaacttacctcattagctactgttggagaaaagtcagtcaatgaataattaataggatgtgataaccaagggagtaatggtgtttaaaaacagagcttgaaagaaagtgtcacccacacgcagccccattaataagagcctcgcagtccaatgccacttgcaaggaggtgaggccctggcccgttgcctcctgttattagaggtcaatagaaaaatctcctcagcctcatcacagacgtgcacataggtcaggaattctccttaatggcagcaagaaaaagcttccactttatcaaagcagacagtccttggcacaagtaactcagcaaaaatacaaattagaaatagcacccaaaggccagccaggtgctgaggctgccagccatgcttcagagaaagtggcagtctcgtgtctgccctccggagacgaaggcgggagggcagcaagtgggagctccgccagatgcctccgacctgcatacggctccaccctaccgatttccaaacaggcccagtgcttgcagcaagcaccacacacacttgacacacacaagatacagtctctcgtggaaaatctggaggaacggttgtgcacagctcctgctggaagtgagatgcttattctactgcttggaaagagaggagattcattttcaaggaagctttcttgaagggcgagatagaattttgacttaagttgcatccactgtttgtatatagatggtctttcaagatcctgacattttcttatgcaatttccaagaaagatcaaatacttttagagaatacttttttcttaacggtctttcaatcaaaatatcgtttgcgtagggttgccaggcaaaatacagggcaccccgtgaaatttgaatttcagataaacaatgaaaaatatgcaatattagggacacatttagactacagaattattcattgttcctggatttttacttgctgaatctggcaaccttaagtttgcaatctttcttatccatccaacataaagatgtgtggtgctgagcatgtctggtgctgagcacagagagggcctttcttggaggggttgtgtatggattacttaaggaagataaatgacacctggaaacagcatcaacattaaaccatgtgcaggagatttcctgcttgaaattttgcaaagtgtcttctgggttgtatgacaggatactagacgaaatgacaagcgagaggattaattataattaatcacagaaggaaagtttgagggcctgggaattcatatttcaggttgccaaagctatttaaaaagcaatgtaatacaacagttgtaatggaagaacagtcagaagataaaagtaaagcactgataaaatatcatatgagtctatttcaaagttgcaaaattcaaggttaaaatatttctctttagagcttttgaattagttgaaggggatgaaaggcaagctttatgtaaccacttttccagtgaaataaaacctgtttacatcttggtgactgaaacaccttccagctaatttagaattctcaagtggccacatgaaaagattagaatttctataaaaagaaatgtcccagttgcgttccagttcaggtatagagaacgcagttactgaagggtcttcagttcatctgagctagctgagtgccacccatcggaagctgctgcgtttggacactagaacattagaagatgttattttattcaacagaaccagcttggtagaaatgttggaatttaataaagacaagctctctttgtggtgttttactgaaagaacacagtatctgcaaacctagagtccatttcccaagctcacgtttgttgttgccagttttatttttacactacagaaaaggtagaaaattcctttggaaagtctgcctccctcccttccttccttccttccctcctctctctttccttccttccttcctctttcctcccttccttcctccctcccttcttcctcccttcccttccctcccctccctttctctctcctccctccctctccttcccttccccttccttccttcctccctccctccctctccttctcttccccttccttcccttccctttccccttcctcttccttccttcctccctcccttctcccttctccctcccctcccctcccctctcctttcctttctttcacctttaaggtcaggggtacatgtgcaggtttgttatacaggtaaacttatgtcaccgggtttgatgtgcagattattttgtcacccaggtgttaagcctgttatccattagttattgtttctgactatctccctcctcccagcctccatcaactgacaggccccagtgtctgttgttctcctctatgtgtccatgtgttttcatcgtttagctttcacttgtaagtgagaacatactgtagttagtttcctttcctgtgttcgtttgctaaggataatggattcctgctacatccatgttcctgcaaggaacatgatttgttcttttttatggccgcatagtagcatagtattccatggtgtgtatgtaccatattttctttatccagtccaccactgctgggcatctgggttgattccatgtctctgctattgtgaatagtgctgcaatgaatatatgcatacatgtgtcttataatatgatttatattcctttgggtatatatccagtaatggaattgctgggttgaacagttctgtttttaggtcttcgaggaatcaccagtgttttccacaatggctgaaataaaatttacattcccaccaacagtgtataacgttcctttttctccacaacctcgctaacatctgtttttttttgacttttaaataatagccattctgattggtgtgagatggtatctcagtgtcgttttgatttgcatttctctaatgatcagtgatgttgagctttttttcatatgcttgttggccgcatgtatgtcttcttttgtaaagtgtctgaccatgtcctttgcctactttttaatagggttgtttttttcttgtaaatttgtttaagttccttagaaatgctggatattagagctttgtcagatgcatagtttgcaaaaatgttctcccattatgaaggttgtctgtttactctgttgatggtttcttttgctgtgcagaagctctttagtttaattggatcccatgtgtcaatttttgcttttattgcaattgcttttggcatctttgtcatgaaatctttgcccattcatatgaccagaatattgcctacgttgtcttccagggtttttatagttttggggttttatacttaagtctttaatctatctcgagttgatttttgtaaatggtataaggaaggggtccaatttcaatcttctgcatatggctacccagttttcccagcattatttattaaatagggaatcctttccccattgcttcttttgtcaaagatcagatggttataggtgtatggccttttttctgggctctctattctgttccattggtctatgtgtctgtttttgtaccagtacccatgttgttttggttaccatagccctgtagtatagtttgaagttgggtagtacgatgcctccagctttttgttctttttgcttaggattgccttggctactagggctcttttttggtttcatatgaactttaaaatagtttatttctaattctttgaagaatgtcaatggtagtttaatgggaataacactgaatctgtaaatttctttgggcagtatggccattttcatgacattgattcttcctatccaaaagcataaaatgtttattcatttgtgtcctctctgatttccttgggcagtggtttgtagttctctttgaagaggtccttcacttcccttgttagctgtattcctaggcattttattctttttgtgacaattgtgaatgggagttcatgatttggctctctgcttgcctattgttggtgtataggaatactagtgatttttgcatgttgattttatatcctgagactttgctgaagttgctcatcagcttaagaagcttttgaactgagacaatgggggttttctagatacaggatcgtgtcatctgcaaacaaagataatttgacttcctctcttcctatttgaataccctttctttctttttttttttcttttttcttgagatggagtctcgctctgtcacccatgctggagtgcactggcgtgatcttggctcactgcaactgccacttcctgggttccagagattctcctgcctcagcctcctgagtagctgggattacaggcacgtgccaccatgcttgactgatttttttttttttttgagacagagtcttgttctgttgcctaggctggagtgcaatggcacaatcttggctcgctgcaacctctgcctcccgtgttcaagcgattctcctgcctcagcctcctgactagctgggattacaggcgcgtgccaccatgcccagttaatttttgttatttttagtagagacggggtttcaccatgttggccaggctggtctcaaactcctgacctcaggtgatctacctgcctcagcctcccaaagtgctgggactacaggtgtgagctaccgtgctcagcctaatttttgtatttttagtagagatggggtttcaccatgttggccaggctggtctcaaactcttgacctcaagtgatccacctgcctcggcctcccaaagtgctgggattacaagtgtgagccactgcacccgggccctttatttctcttgcctgactgctctggccagaacttccagtactttgttgaatatgactgccttttgatcagttttgacccagtactgctctcactaggttaatcagccatttcagttaaggcttggccctgagtgacttttgtcagtgaagtctcaggatacaaactcgacatacaaaaatcactagcattcctatataccaacaatagctgagccgagagccacatcaggaatgcaatctcattcacaattgtcacagaagaacaaaatacctaggaatatagctaaccagggaggtgaaggacctctacaatgagaactacaaaacactgctcaaagcaatcagagatgatgcaattcctctgtagacccgattacatagaccctccgactgtactgagtgcagctttccttttttagaacaggcaggtaggatggtgtctcagtcggtttgggctggctataacaaaataccatagactgggaggtttaaacaacagacatttatttctcacaattctgaaatcttcaaatccaagatcaaggtgccagtggatttggtcccatggggaggctcctcgtcccggtgtgcggatggccatcttcttgctgtgtgctcacatgacctctcctttgtgagtggtctggtccctcttattcttcttataagggctctgatcccatgatgggatcctacccttatgacctcacctaaatctaatcacccccaccaaaggccccacctcctaatactatcacattggggattagggcttcattgtgtgaattttaagagaacgtgaacatttagttcataacaggtgctgagatagataagctagtgacaagtaccatgtttcactatagacccccttctgagggctgcctatgggggcaagtgtccccacacctcagaaacactaacatcatggaagggtgagctcaggaagacccacatttcttttacgagctttgccttttctaaggttttagcatcaagacttccaggagatgctcttcatcggaaagctcatggccagaggcaaagataacactggaagcatgatgaggatgcgctgcatgaagcttgcaaagggggaggttaacacggaaatgttaaatactaaccacagtgatggcagtggtgttagaaaacatcagtctacaatagctactgaacacctgtctcagaattaaagacatgactaggatacagtctttactgcttcctcaataaatttacaacaaaaatagagattaggccagagtgggaaggattacagtcccagggagaatcaacaggcatgctttcacatggttggggtacagcaaaggggcccctgccttggtggaaagagaggggccaggtatattagttcattttcacagtgctataaagaaactacctgagagtgagtaatttataaagaaacaaatttaattgactcacagttccacatggctggggaggcctcaggacacttacaatcatggcggaaggtgaaggggaagcaaggcacgtcttacatggtggcaggagagagacagagagtgagcaaagagaaagtgccacccttttaaaaccatcaccttgagtgagaactcactcacaagaacagcatgggggaaaccactcccataatccaatcacctcccaccaggtccctctcttgacatgtggggatgacaattccagatgagatttgggtggtgacacagagccaaaccatatcaccaggcgtgttctgggctcaccttgtagaagaagtgacgtagcagagaacacagggtttcaatggtcagtggagctgagacagaggagggcatttcagaaggaagcagctaccagctaaggctgaagacagggaaacactgtgagctgctgcagggaggcaggcagagcagaacacggagtggggctcaggcagggcctggctcctgggagtgcctggacgtgtgatccttcccctcggccgccaaagtcccaggactagcactctagaaatgcatgtgctcttctttcccaaagaaccccagccccaggtcaatgaaatggttaagctggacttctctccacaggtggcctgattcttgtgtgaactgccacctgtcatgacacccaatccagacaatgtcctttaaatttgtccccatctgcctatcaagagattacccatagtaaaatacatacaatataaaaataaccattttaaccaattttaagtgttcagttcagtagtgttaaagtacattcacactgctgtacaaccatcaccaacacccatctccagaacccttttcattttcccaaactgaaactcaataccccttaaatggcaactcccatcttccatcaccccaagccctggcaacaaccattctacctcctgtctctatgaactggactactccagatactgcatataagtggaatcatacaatatctgtccttttgtgaccatcttctatcatttagcaaaatgtcctcaagattcatccgtgttgcagcattgtggtagaatctccttcttttgtaatgctgaatgatattccagtgtacagatatgccagttttgtttatccagtcatctgctgatggacactaggattgcttctaccttttggctattgtgaataatgctgctgtggacagggtgtccagacatctgttcaagtctctgctttcaattcttttgggtaataaccaaaagtggaattgcttgatgatgtggtaattttatttttaatcttttgaggaactgccatactgttttccacggtgtctgcaccattttagttcccataaaaaatgcataaggttccaatttatccacaaccttgccaacacttttttttttttttttttttttttttagatagagtctcgctttgtcacccaggctggagtgcaatggcgtgatctcagctcactgcagcctccacctcccgggttcaagcaattctcccgccttagcctcccgagtagctgggattacaggcacccaccatcatgccaggctaatttctgtatttttgtagagaaggggtttcaccgtgttggccaggctggtcttgaactcctggcctcaggtgatctgcccgcttcggcctcccacagtgctgggattacagaagtgagccactgcacctggcctcaacactttttaattcttattttaagtagccgtcctaatgggtgtgataaggggtactgagtttcagtttgagaaaatacgatatctcactgtggtttaaaccaggacacttttaagagtgaaggaggcaccacctgtaattatacagaggcatgggcgcaagctggggtgacggcagctatggtccgtccagggcatcacacggggagtggtgccactggggccttctgagctccccggggctggggtttggaagaccagagcgccaggcttcgttggagagcagaatagccttcttaggggcccagctcctacctatcatctacccagctgcctgtctacctgaattcccctagttgctcactgaaagatagaagaaaatttcccagactatctccaggtaatcaaggtggagacagttttagaagctcaaggaggctcctgtggaaacaggattttaaattagttgaagtctcacgtaattaaaatgattttgattgtaatggtcacttcagtaattccttgtctatgaaaatatttaccagcattactattgtacaccttatcacatcagtcaccatttgaaagaagtcaccagccaccctaaccatggaggtgaagagttgagagtgaaggaggaaacggagtgtttgactttatcctttatcactcgtcaaggccaatggcgaatcatgtcgctttttgtttttttagtgcgactgtactacctagagacacgggctatttggaatcagctttttgttttacacgcctctttccccaaaatcatctgctaaggcttgacaacagtgctgagaggcggacgggtgactattactctctccacttgacagatgggaaaaaagactcagagaaataaagtcagtcagtcaatagtcaggggtacatcaggcaccgtacacgtgccgagatttgacaggcacaagctggggtttgctgtccatggaaggcaggaaatgaggtgtctcagcacagcagtgatgagggtcaccaaaaggcaagcagatggtgctgtgtggacgatggcaatgcatggagggcctgctgggggatagggtgtttaagctgtagcctaacgtatgggtagaaggtggccaggtaagctggaggggaggaaagaaaaggagccaggaaaggaaaacagctccagggagaaggtccagcatgtgtgctatagtttgaatatggtttttctgtcccccaacaaaaccagcattggagtttgagcctcactgtgtggttttgggcctggtgggaggtgtttgggtcatggctgtggtggatccctcatgaaaggctcggtgccgtcctcccagaagggagtgagttctcatcctggcaagatgggattagctctcatggaatggattagtccatgagggtgggttcttacaaagcgagtggttccccacttcctggcccctctttgcacctgcccacttctcctctgaccttctctaccatgtttggatgcagcacagaagccctcaccagaagccaagctgatgtcagtgccccacttcctgtacagcctgcagaactgtgagccaaataaacctcttttcttccttcctttttttttttttttttttttttgagatggagtctcgctctgtcacccaggctggagtgcagtggcatgatctcagctcgctgcctcctccgcctcctgggttcaagtgattctcctgcctcaacctcccgagtagctgggattacaggcatgtgccaccatgcccagctaatttttgtatttttagtagagacagggtttcaccatgttggccaggctagcttctgacctcaggtgatccacctgcttcggccttccaaagtgctgggattacaggcgtgagccactgtcccaggccacatcttttctttctaaatcacccagtctcaggtatccctttatagcaagagaaaacagacaagacaatgtgcatgcacaggtgagggagaatgaaacctctgtgactgtctgtagtcacatgaggctatggcagagctaagctgtggcttggcagagccaaggcttgaaggggacccaggaaatcactggtgagcccttccgattattcagggaatctgcatggtctccacagccctggagtttcacttcctcattgaggcaagggagttagatgactgaaggccggtgcccagagaaacaatatatgggcagggttcacattttaaaaacccatggcatacaaagttggtgtagagaagggagcaaaatttgtccttcattttcaaatgctagtgaataggtaatagttctccagtcagctggaatgaaggggaaaagcttcaagaaatatgtcttaggaaataacgttggcttggcactcccctccttcattatatgtctaaacacaaccattgcacttttcaagttttttttttttgtcatcttctatatttaagtgcagaacacagaaggatggttgaagtccccagatccacttccttggatagaacagaactagacgaggtgtgttcttgcaagcagcccccagcagaatccagccatctgggcaggagaacagagcagcccctggccccatgtgcagtgctcagacttgtgctgtgagcacgacttgaggcagagctggattctgtcatacacacacacacacacacacacacacacacacacacacatatggttgctgtatatcatgtatatgatatatatctctatgtacgtgatatatacacaacatatctatgaatatgatatatacacatatctctatgtatatgatatatacacatatctctaggtatatgatatatacacatatctctaggtatatgatatatacacatatctctatatatgatatatacacatctctatgtatatgatatatacacatatctatgtatatgatatatatacgtatcacatctatgtatatgatatatatcatatatacatatcatacatatacacatatcatatatgtatatgacacagggtcttgctgcatcactcaggctggagtgcagtagcacaatcatggatcactgtaacctctgcctcctgggctcaagcaatctttccacttcagcctcccaagtagctgagactacaggtgtgtgccaccatgctaatttgtgtgtgtgtgtgtgtttctgcagagatgaggtcttgccatggcacccaggctggtctcaaactcctagactcaagcgatcctcccaccttggccttccaaagtacagggattacaggtgtgagctaccacatctggccaattttgttctatttcaagggcactcaggttgatggaagagggatctctcaggcatctagctccatctgccaggccctccctgctgaaggccacaatgccacccctaaacctggctctaccccctactgtgttcattaaccttgggcaagtggctccatctctctaggcttcagtttccccacatgtaaaataaggatactgacatttgtcccctgggctgtctggggatgaaatgggatgatggcagcaagtccccagcacagggcctggggcagcaagcatgcaaccctgagagactacgaggtcacatacgccccccacatctgccaggaccacatgcctttgccagagaggggcaggttatcatctggcttggtgggaaccttccaacaacagcgaaggccatgaccacagtccttctgtaattccattaaatagtttagtggctggggccatgattcaaagagaacctggacctccttcacgtagtccctcagatgactacaccttaatttgctgtgcttgcattgggtccatggttatttttcttggcttcttagcaccagcattagccaggctgaataggggtttctgtctccaaagtaagatgaggaactgtggcctaatgtggctccctgactcactggctgggaacagggtgaacagggccacagggaggccatgtggggagctgccagggcttcagactcttggcctgggctgggcttcatcgaggccctgtccagtcggctggattggggccagtgagcaggcttactttgtctgtgaaatagaaaaaggggccatggactcacccttcacaagcagttggttcacttcaacattttaatggaaccgacctgaaattaatgagcactgtcacactgagtaaatactgcctctcgggatgagagcggcaatgggtagaaggcagtgtgacaattcaaacccaaggccacggacaattacatagaggaagtctgttcagaatttggcggatcgaatggctgtccccaaataacaggcatgcagatggctggagtctgatgctgcctggcgagggcagaggcagatgctgcattctgagggccagcaagaggacacgacgtggcagtgggccagccagccacagccgggagccagcacaggaaagggagttggacggagtcagaaggtcaggccgccccagtgaacagggagcacattaacctttccaaagccacgggggagcttatcaggctccaaaatgcagtcatcaaaggccagccagcccagtgcagccaaggctggcccggggctacctctgggagcaggtcacggggcggcagcctgtgagcggaggtgagggcaggccctgtgcccagagtgagcagctgcagggtggtgtgctccagctggctctgggagtcccaggctggagagtggaatggtcagggtgggactgttccaggggtgggaaaaggggggaaatggagaggacgggagtgggtagagggtgctggcctgaagggctcttaaagccagagagaacagactccatgggctttggccagttttctttactaaaaggagatgaaaaacagaacaaaacaaaacagatttgatatcatgactttaactcccatgaaaagtagttaagtagtttggttttaaacaaagcaaaacaaagcaaaacacctcagtctatctattggctttaaaaccacccactcatcacagatgcttttgcggcacggcctccgcccactgcaggcacaggcatgagtgatgaagacagtggcacctgtgttcagaaacacatacgggcactgaaatgcatcttttttgaatctttttttctccctgtcacatatatcatttgttgcgtttggattgcttttgaggtcagatctggctcaatgagaatggggacgacatatgcaaaattaaaaaggggggactaccaggtgtaccttcacatggcatcagtgtaaacattctaacagaaccgaccaccaattaaccaatcaccaaccaacacattccatgcagacagcaagtgcttaatttaatctaagtacattcaagaaggaacaggtgtacttctacttcagaaatagatattttaaaaaaagaagtagggtagacagcagtgacaaacactgaaaactatgctaattaagtcttctctctcttaattccaactatgagacgtcatgcgtattggatacttaaaatttttttggatgtaaatttaaatataagttaaatgaaccattatgcattagatacacagtgttatgttgtccttggtctagaagggacagctacattggcattcaaaaggagtgtgacatagtgacaaagactcaagtaaaaataatttatagcttagtgatttcaatattttacccctggtaacttaatatacttagtctgaggatgagttcagaagagaggtagcacaaagtgggatgacaacgggccagaaccagtatttttttttttttgagatggagtcttgctctgttgcctaggctgtagtgcagtggcatgctcttggctcactgcaacctccgtcttccaggttcaagtaattcaactacctcagcctcctgcaggtgcacaccaccacacccgactaatttttgtatttttagtagagatgaagttttaccatgttggccaggctggtctcaaactcctgacctcaggtgatatgcccacctcgacctcccaaagtgctgggattacaggcatgagccactggccagaaccagttgtcttttcactgcctctagggacagtctggttccctttggccctttcctgtgttcgcagactgcagcgaggctgggggactccggtggtgggggtgggggactctggtggtgcgggttagtttttctcgtctgtggtcacagacacctggctaaggagcaggggaggggtggtgggtggggctgtgcccagctgtccccccgcccacagaggatctaagtaacttgcaggaagtcttctccactagcagagaaggaaaggacgcatgtccaggctaaaactccagcacctcaaacccaggaaagagaacatgggattcccagcccaggcctatgagaaagggggcatctggaagaacctgggaaactggcatctgcaggatgtttgctcttaccccccaccgcctgtttttcctgtttttaattctggaaacatacacataacatcaaattggccaagggtgtccagttaggtggcattaagtacatgtatgttgttgtgcagcctagaccactatcattctttctgaaagagatcaaaactcttctaactgtgccccagatcaagtcaccccatgtgtttctgcaggctcgtgggaattgtgaacattgacttgaatgggttaaaactgaatttcacccggaggagccttgggctgtggcctccttaccagacatcaggcagcgagtctgtattagtcctcaggaatccctggccactaaaccatcttaaagggcaattagtggctttatacaactcgttatttatttactcaaaagactgtatcctcagcctgctctcttcttctattgtgtaaaatacatatttgggaccttttaaaatgtgtgttatgtacctgatagaactcaatggcttctctggagccattctgttttattgtggaaattagtactaggggggcttttaaaagctgatttttagacccgacagcctgcgtttgttcacgttaatgcagtggattgagctaacagccaccaaagggctgtgagggacacctctgtggcctctctgttggagcagtgaggccaaggggctccacttttgtgactatagatggtacttgctgggcctgttagagaggagaggactgcatggagactcagttggcacttatctctcttcacactgcccccgacagttctctgccagggctcccccacgttattgaacattactgtttgcttttgaaataataagtattatttactttgaaattataaaatgagaccaattctttggagattagctggaaaggtgtcaggatatgacccagggtgacttttttatgtatttatttttttaattaatttttttttttttttgagacagaatctcactctcacccaggttggagtgcaatggagtgcaatctcggctcactgcaacctctgtttcctgggttcaagtgattctcctgcctcagcctctcgagtagctgtgattacaagggtgtgccaccgcacccagctaatttttgtattttttttttagtagaggtagggtttcaccatgttggccaggctggtcttgaactcctggcctcgagtgaggggaatcctaaagtgctgggattacaggcgttagccactgcacccggcccaggatgacttttttccgtgagtaaagtaaaaagacaatgtggcagaaacaggtggtagcctcctcggaggcatgcaggagcctcacctgggacccaaagacccacagtttggcttttaggagaaaacaggctctagtaaaacatatttcaaaatagggatggcgtgagtaatagaagggatatttcttaggatttgttgatacttgtttttctataatatcaatgtaaaaacatgccccatactactagttatgaattgcttcagacattaaacccatactctgttatcttcttctcttggtttttaagcctcttggtaggacttaaatcaaagaacatcttatgatacctcatgcgtgatttttcttggtggtgcgatgaggtaattactatcatatggagggagaaaggaagcgcctcttctattcatcacctcttttaatctgtacataaacctaacaaggagggcattagtagcatcctgcttctgcaactgggaaagctgagacttggatgtgtaaatgctttgcccaaagtaaattccagaccaagttcaaggactcaaagtcctgtgcttgcttcacgatgtcttgtaaaaagaggagagagtagggaaagctgggccagagggtttttttttttcttttgctttcttgtctccttaatcatgacagcataaatgagtggcataatttgtattcttggtcttactgcattcaataagtcatgattgagcagtcattttgtataaagtactactaatagtcaagatgtggttcttgctctcagtagttaagaccagacataaataaaggaggcagagactgtaagctgggcctatgccaggaattacatgaggtgctgatggaataggagctgtgggcgctggggcagttggctatttaaggtttccgtagaagatgaggcttgaccccatgcttgagggatgcactgcgtaaccgaagatccctcccatgagttcttgcactggcagctgtctagagctggcttcagacactttctactcagatgcccacagccacagaggggaggcctgccactccctgtccaccctgcagcctggccctgcccaggccattccttctgtgttctcctcccttctccactcctgggtcacccgatgcttcctgtcctccacatgacacctcatatgtgtcctcccccttctccttcccctgtcagagagtagggtaatattgtacctgtgtccctccagtgacactgatttcttcatagtctgatgcagagggctgctactgaagtagctaagagcaccaactctggagctgcacagaccactctgtggctttccagactgggggtgaattacctgagtttggaaagcaagactcactaggattttagggagagtactttagaagatgaaatgaggccaggtgtggtggctcacgcctgtaatttcagcactttgggaggctggggtgggtggatcacctgaggtcaggagttggagaccagcctggccaacatggtgaaaccccatctctactaaaaatagaaaaatcagctgggtgtggaggtttatgcctataattccagatacttgggaggctgaggcatgagaatcatttgaacccaggaggtggaggttgcagtgaactgagatcataccactgtactccagcctgggcaacagagcaagactctgtctcaaaacaaaaacaaaaaagaacacgaaatgaaatgaaatggagtttcatggaaaatatctctttaaggccctcacattgcattcttccttcctcaccaagagagtcgtcgcgaggactaaatgaagtaaggtatgtgagatgctcagtacactaccggacctgcgactgttctaaggagatctatgactacttatgtgtatgccagcgttgtggtatactcagtatttatgcacaagcctacatgtcctctaccacactgtagattccctgcgagtggaatccttgggtaatgaatttttgtgtcttctatagagaccagcagaatccctaacattttagggattcagtactgtaaatattcactgaatgaatgaagaagtacaaatgcaaaacataagtatgaatagttggtgaagacagcacactttaagtcatgtcaacggtacgaagcacaaaaatgagggggcaggagagggagggaggagccagaggctatctggcccaatccccactcgctacaagagacttctcgatagcatcatatagttctcttttgttattgagttctaatctaattccactctaatttaattatactgagtggttttgatctttttttttttttgagactttcttgcctacttttggactgagtttttttctcatttttccatttcttccccctgtgtgtttggattctataacatccatacaagcaggcatgaacacctctttgagccactaagcgatgagcccctcatcatctacctgtgattcctgaggcatctgttgcaaggatggatagccacagttgcaaagaattatttcctcttttaagcccaaagttgccattattttaaccacaaagcattggtctagctcatccattcatttatcaaatgacttacggtgtctgctaattgccaggtactgtgctaggtgctagagataaaaaggttaccaagccagaaatattgttacgatgcaaaacgtggcccaaacctcctatctccgaccccagccaagctgctctattggtgcttgatgggaggcaagagaatcatactgaccaggagtccagggacctgggatctagtcctggctctgccacttgtggccctgggtgagttgcatcacctgttcgcggctcagttttctcatctgtaaaatgggccccatctatctttcagggttgttgtgaggatcataaaatgagacagtaaatgtgatagtgattctaaactctaaagctctcaaagtttttattcacaacttaattgtacatttaaaaataactaaaagagtataacacaagggataaatgcttgaggtaatggattttttaaaagttttttattcatatggcatacttaaaagattttttttttttttttttttttgagacagagtctcgctctgtcatccaggctggagtgcaatggtgtgatctcggctcactgcaacccccgcctcctgggttcaagcgattctcctgcctcagcctcctgagtagctgggattacaggtgcacgccaccacgcccagctaatttttgaatttttagtaaagatgggatttcaccatattgatcatgctggtcttgaactcctgaccttgtgatccgcccgccttggcctcccaaagtgctgggattacaggcatgagctaccgagcccagccctaaaagacttctttataaggagccatattgctttggggagaccgaaggctgctgagggcctcagggcagggttgatatgcacctgccagcacgccaccataacatcttcatggaaccttaacactttcttaaaagtgctccacctccttttttttgacccttaaagaagagaccaactattagtactgtgtggcaactgtgcctgtcctctcacatggccaggggactgggtgacacattacccagaaaggtacacttctgtgctggtggccactccaacacacttcctttgtttggctggagctcgtccacttgacaaggggtcaggaagatgaagctgaatccaaccccctacactgccaggtgggtacccgctgccctccccaccttgctatggaccatttctgatctggcttctggacacagaccatttcacattcttctacctacatggaggtgaaactcccttagttttaggcaattcctcatttacttaatttcattatatactccctaatgggcaacaaggagattggatgtgtgagatttatttgagaaagggcaaaactgagggcagcaaatgtgtaagccttgtgagtcctttctccttgcaaaggcaacactcgtctggctggtgaagccaagagcacagccacacggctgtttctcatcctggcacccccagccccagcacagcaccccacagagcatgctggatgcgttcagtaaatatttgtgaaataaatgaataaatcaatggcagttgtttggatttcaatataaatggatcttgggcctgagatactgccagatgggcagacaggttacagtctggtgatgcatctccaaggctataaaaatgtagccgttgctggagtcgcaggctgacatttcagatgattatatgcacaatttaaccacatggctatctgtgccctccaagtgccatcgcttcaacaactgttttcatgttggcttttttgctcgttcctctctctttttttttaagtcaagcataattttttgcagcctctcgtatttctagctgaacgtgatttattcatataaaattatgttccatttttataaaacccaagttactgcaaatgatgcttgaggtttcacagaaaatattaattcctgatctgctgctataaagcatgcctgctcgctgagagcagcgctgtcactctgagacagatggaagcagtccaagggtatgattaacttcttagtcctggcaattgcctagtgctcctcttgccctagatttcaagattgacctccagcttctctgcagacgcgcagttgctcagcttgataaatcacatgaatcccttttttgatcagagttatctactatttactactcatgaagggaagttaatcgtattcaaggcacttcatatgctgcacacatatccttccttcttcctaacggcactttgcatattttccacattggcggtgatgtggcttctttcgcagtgcagagggtccacaccaaagatccacctttatcctgtttgtccttcttctttgtctctactaaccagcatcaaatacaccgacccacaagaagaaaaaacacgagaggcacacaataagcagtgaataagtgagacgaattctgtccctttgcaaactgagattttcttgtaattggcttctttactttgtcaagaactttgctgggccgagtgtggtggctaacacctgtaatcccagcactttgggaggccaaggcaggcagatcacttgagcccaggagttcgagacctgcctgggcaacatggtgaagccccccctctacgaaaagtccaaagattagccaggcatggtggctaccatggcactgggcagggcacggggagagctgagatggcttgagcctgggaggtcgaggctgcagtgagctgtgatcacaccactgcactccagcctgggtgacagagtgagaccctgtctcaaaaaacaaacaaacaaacaaaaccagaaaagaaaaaagaattttgccatctcttcttgccctgtttgtctgcttttttcatttctgggggacataaatgggcctctggtaggccagttgactctcagtggtataaaatagataaaaaaattctactgtccagagtagaaaagaacagacaacacaccatcccactctcacacaccccttcttgtcactgctgggcgggaggcgcaagtgagtggggctgaagcccaaactccccttctgcttgccatggtgatccagtttcaacctgaagcacattttgcctatttggggtgaaccataaattaagtccattggtcaggcaaaaccaagcaagggaaaaggttttttggggatgatcacagttgatttttaaaatttatgtaacggaaatatcacagttttaatttatcaagatgttatattgattacagaagattctctgaactttaaagcatacagtctaaactgtcagatattggatttgtgctgaaatgccaatttagaaaataaatcaggcgactggagaaatggaaagacaagactgactttccaaagacatctggacattctctaacctccaacaacccagagggatgagacttctacccactccttaggaagggaaagggaaacacacccctttctttttcttataactggtctcatcaggtcagatctcaaggctttgaagttgggcttccttatagggaaacagataacaaaaactggcttcctacagtgtaaactcatgtccttccaccaaccccaagtcaatgaaatcctgtttcatcatcgatttgtgtatcttggaacaaaatagctccggccttgtctaaatgtccttgtgttcactggacactcaaggttgaggctcagtggaagtgaaatgagcccatggatgagcaaacttataggacactgaggttctgaaggaggataagacccagagtgtgtcacagacatgctcctccatgaggaaccagtgtgcatggccagagccagtacgggcttttctgtcctgtcccagaattatagaactcaggaagcaccttttgaggtctgaaaagtgcttctcccccaagaacaaagatgaaggcatgagctaatcattatgaaattttatataaagaggtgataacaggctgaaagcaaaaggtttagggaaccaggatggtttgtgtaaatgaatgtataataggttaataccaggctccaagtagccagagatattgggcctagaaccccactttgggatattcaggacctggggagatctttactcaattcctttcccaccctgaggttcctctggcagccagaacattaggcaagtcatacagtggtctgacttgaggcactcgggtcatttttctagaaaatattggtttattcaaaagaataagtaatgtgagagaaaatgacatctgtcacttgataagttattctctacttaaaaactagaaaatatgaatgcaattaattcagcaagtgttttaaaatcattattttgaagaagggttttaatttccatcttgaaatggttacaaatgcttatcacttatggggattacgtctgtggccctgaattagtagagaatagacaatagaaaaagaatggctgttattgaaaagtcaaaaaacaacagatgctggagagcctgtggagaaaaacgaatgcttgtacactgttggtgggagtgtaaattagttcagtcattgtggaagacattgtggtgattcttcaaagacctagaggcagaaataccatttgatccagcaatcccattaatgggtatatacccaaatgaatataaatcattctattataaagacacatgcacgtgtacgttcactgcagcactgttcacagtagcaaagacatggaatcaacccaaatgcccattaacgatagactgggtaaagaaaatatggtacacatatgccatgaaatactatacagccataaaaaggaacaagatcacgtcctttgcagagacatggatggagccattatcctcagcaaactaatgcaggagcagaaaaacaaacaccacatgttttcacttgttaagtgggagctgaatgatgagacccatgacggggaaacacacactgggtcctgccggtgaggtgtcaggggagggataacatcaagaagaacagctaatagatgctgggcttaatacctaggtgatgggttgatgggtgcagcaaatcaccattgcacatgtttacccatgtaacaaacctgcatatcctgcacatgtgcccctgaacttaaaatacaagttgaagaaaaaaaaagaaagaaagaaaaaagaaaacacacagagaaggtagctttacacaactgcactgctagaatagcaaagtcagctcgtcactttgaaatgaccaattctgaatagaaaaagtgctacagtaaagtaagggaaatgccctattacatttgaggataaagaaatttgtaagaagagtggtgacaatgaaaacctctgtttttgggtggggaatgggcttgacaagggattttttgtgaaaatatcagaaaaaaaggaaatggcattgttcatcattaacatccatggacattttctctttaggacaaagttgtatatgttttgggaagaaatcttcgaatgtatcagtcctagtttctgatgaattgtctttgtatttgtgaccatgtcttcaaaataaatccttattttcctaaaataggttttgattcattctactaaaggtcataatgaccttttttttcctgtatttatatgtgtagctttactaaaatataatttacattccaaaaagttcacccatttaaagcatacaattcagtggtctggtatacttacaaggttgtgcaaccatcaccataatctatttttacaacatcatcatctccaaaagaaatcttgtactcattaacaatgaccaagtttcccttgcgtctcagtgcattttgttgaaggaactgcttacttaagaagaaaagtcaaagacagaaaagaaatatgtataggaaagaaatgactatgttatattctacatgtgttttgatctagactctttcctcctcctactgacacattcagaagcagagcagtcatcagcttttgtgaaaatcccaaaagcaattccagaagatcatgtgccagccactcaggacacgcaggcttgtgtggttgtcatggggaaggttttgtaattgaaataaaaatactcatgctcagtctgccaccacacagaaaatgcttttcactcatgcacaccagataattcgcctaagtgacaggttttactttggaggaagcaccgagctaagctggtttacacagtcaatgatggctcattccatgaaaaaggaactgggaaggaaggcagggtggtgaaggttagctagacaatgtggaggtggctgccagccagtcagccaagggcacagctcctcctgctgcttctaatgctgtggagacacacagggatttcatctttacctcctgacagttcctcaaaacacgcgcgcacacacacacacacacacacacacacacacactctctctctctctctctctccaatcttagtaagtgaaaaaacaaaaaccaaaaccaaccaaaccaaaccaagggtctggtctattctagaaagtgactttacatacccacattcaactatctgtctacagcctttcagacaaagcaggatataaaatacagcctgtgtgtgtttcttgatgaggtttacacatctcattcagtaacacgcgccaggagaaagacgccaaagcaaggagtaaaaagtcaagcacgtgggaccgtgagttgttgggttatgtgcataaaatatttcaagagagagaatcttatcaaaagatagatagctcccggtgaaatgatatggaaaaagtctgaagaaaacatctcaaaataaatgaagtatttattgctgaaaaatgagcttagatctcagccagttccaaagttcagaatttaccgcaccactcaggcctttctctctaagtttcttgtctcttgtttcattgcacaacaagggattcttcatacttgctatgaaatacaacaaggcgatttttgcagtgataaactccacacatgcatgataaatccaagcatgcaaaatgtttaacatcccagttcagagatactttagggacaaaatccgattatgaattatatgccacaataaatagggctcaatgtttcataaagcaatttatagttcataaaaatgacaaaatgtacctgtcagagagagcgcggagagccgttctctgagctgcctgctggaagaaagaaagggcagagatgtttatttaatattctgacttttgaattacgtgctcaatgaacacttaaaaaaaagacccctgcattacacacatttttgccatgtggccaaattttaaacgactagcaatgaagtagagagcactgttgtaaaatgtgaaatgtgtgtgatgaaatgaaccttcacggacagttaactgaagcccggcaatgcacacctgcaactaggggatgagtttgtcgggggggcaaaggactgtacccaggtaagcttggacaggcctctggaaattggcaaagaccagagctacttctctgaaatcactttcccattgctttattgtcctttcctataagaaaacaaaaaggtctgttttggtttctttgtagcttctttcccaatgaaggtgtaatttttcactcggatttcagattgaaagtttccacagttggaatatggaatgccactagaaatctcaagggattattgatttgctttaggcatagttaatgatattatgacaatggtttttaaaattcacattgaaatgttaatggatacaattatctgctgttgggatatgctttaagataatacagtgggagggctgggtgcggtggctcacacctgtaatcccagcactttgggaggctgaggcaggtggatcacctgaggtcaggagttcaagaccagcctggccaacatggtgaaatcctgtctctactaaaaatacaaaaattagctgggtgtggtggcatgcgcctgtagtcccagtgactcaggaggctgaggcaagagaatcgcttgaaaccagaaggcagaggttgcagtgagccaagatcatgccactgcactccagcctgggcaacaagagtaaaactccatctcaaaaataaataaataaaataaaaaaatttaaaaaatacagtgggagaagggcagagtgggtgggcacatacataagacaagatggccttgggctgagaactgctgacgttaggcgatgagcacagggcaggttcttatattattctggccatttccctacatgaaatgaacaaaactttcattttgtattgaaaatgtattgatttgttttttgtttttttcttctactaaaattaatgtgtgtgtgtgtgtgtgtgtgtgtgtgtgtgtatgctgaaatttcccataataaaaaaactaaaagaaaaaaatcataaaaaaggctctattttggccgggcatggtggctcacgcctgtaatcccagcactttgggaggcccaggcaggtggatcacctgaggtcaggagttcgagaccagcctgaccaacagggagaaaccccgtctctactaaaaatacaaaattagatgggcatggtggcacatgtctgtaattccagctactcgggaggccaaggcaggagaattgcttgaacttggggggcggaggttgcagtgagctgagatcgcgccattgtactccagcctgggcaacaacagcaaaagtctgtctcaaaaaaaaaaaaaaaaaagggctccatttctccatcggattctcccaagttttgtacttgctttccttttctctggctattctatttttcacccatttgccttctatctctgggcccaatgaggccaaggaaggcagatggcacacgatgctctctgtctcagaagtcatgactggggaggtcagtagaccaggcctactcagcatgcaccgggaaacaaggagtgtgcaatggtcctttcctctttgcatgatacacaggtcatggttactgtttttttttttctgagacagagtatctctttgtcacccaggctggagtgtagtggcctgatttcagctcactgcaacctctgcctcccaggttcaagcgattctcctgcctcagcctcccaagtagctgagattacaggtgtatgccaccacacccagctaatttttgtatttttagtagagacagggtctcatcatgttggccaagctggtctcgaactcctgacctcaaatgatccacccgcctctgcccctcaaagtgttgggattacaggtgtgagccaccacgcctggcctatgtttactgttgaccaaggacctcacaatacttctcatgctgatagcccatcacatttagatatcaggaaaaatagaatcttcaggttagaaaaaaaagtcacctcagaaccattttctctgttatggaaataaaatacacccttggtgacagttccacatcttgggataaaaataaaagtagaagcagttatcgtcccagaaaagctccttcctaaggtaggagctggatgacctcggtacacttttagaataacatggacatgaaagattaaggcagggcagtgtcaggaaggtgcagggatgggcggccactcctcaaatggtgcctggaaccatgagccggtgtcagtacatatctgctgagtaaatgttagagggatgaatcagtcaggaaagccttccctctgaaatctgagcataattttaaagacaaggaaggatgtggtcaggagagagaaggcattgatagcactgggctagacggcacagcaggggcctgtcccagcctctggcagcagctctcaaccggggcacccatgactcccaaaccctgggtgtctggaattgatgagggtgtttctgtgcattacattcatgagggggatcaataatggcagtagtgtctggggccagggatactaaagcccttcaaagagcaggaaggtcccttgtataatgaagaattgtccccttaaaatgacaaagggtgcctgcagagaaacactgcggcagagtaggaatgaaaggagagcagaaagaagggctgtagggaacatgagctccagggcctggcaaagataaggggaattgagacaacttccataagtaatgcagcaacactgaattaggaaaaccatctagtgtgttgagccggggttggagagtccgacattctgggacaggttttgccattcatttgctatggaccttgcgtctggccttcaacctccggcttagtttccaaaccaccctttccttctctgaatagggtgctgaaagagacagtcagtccgtgtccaggctactatggacaatccaaggggttactgtcccctcctcattccctagattctgaatgaagaccccatgtcctggtattccattgtcataggattaccacaacagataaaagaatacagatctactgatcttcttgataaggagagctgagggagcagcgagaggcaggggaagaggaccggagcctgaggaacccacgcagacacctccagggatgggtgcttccctctcccctcagtccctctcctgtgctcttccatggagccagcgcagagcatgctgataaaacgcacccagcaggcaacaggtggcatcactgctggcaggtttgtctcctggagagtttccctctcactcagcaagatggctttcgctttaggccgcgatacttgaacttaatttaactccctactcctgactgtttggctgaatatacaagaagtatttttgaactgccccaaagaaaggtggaatgtattattagtattgtctcttaacatcatctcagcaggagccatgagagactggctcctcctggagtaacagaaatcataagaggtgtaactaaaagttcaatagaaaccttcaacatggcatctgaatttctccctagtcatggaaatagaccaaggctgtcaatattttaaaaggctattgactcttttctctcccacctccaaacaattcctgctgacttctgtgatacggaaacagcgcttgctgatgtgcagctggtcagaaaatgatttaaaaagcgaaaggaaaacaaacaaacaaaaagaagaaacactgctgtctggccgccaatggagtgcctaggaattgaggcatcccagtggcggcacctgttggcaatgccacaggactgatgttagccccgtcttctaatacaagctgagttggaagcttagagcaagggctgctttcctttagcagactggtgtgatgctgggaacaaaaggtccttctgggccgagagacagggcaccctacgaggcactaagcagtgttctctgttgattcttcactcttccaatctgtcacatgatgtatgctaccacgcatgcaacagcatggtacttagcaccatcaattgcctgcactgctttttttctttttttttttttttttgagatgttgtttcactcttgttgcccaggctggagtgcagtgatgcggtctcagcttactgcaacctctgcctccctggttcaagcgattctcctgcttcaacctccagagtagctgggattacaggcatgcgccaccaaacccagctaatttttttgtatttagtagagacggggtttcactgtgttagtcaggctggtctcgaattcctgacctcaagtgatctgcctgcgtcagcctcccaaagtgctggggttacaggtgtgcgccactgcgcctggcctgctctgctattttttaatgactaattttcattgtgctatttaatttgcagtcactctacatcattaaaaattttacaaaaactcaccatctattatgaaagaagaggagtatatgtcagatgttttaaataatttgaggaaaaaacccttcatggcattatattaattgtatatataccagagcaaaggccaccaagatgtttttactgactcctctctttaaaaaaaccttcagcttttgcacactattttattttactactggaaaataatgaaacgaataaatattggaattaaatggcaaagaaaaaattaggtgactcatgattgaaacttgaaaaagtactcatagtaaactagatgaattgcccaatttcattccttcaagagttatacattacagcaactatatttttctcttcctaaatctcacatcatctcttccttgcgacttgccttttattcagttctcagcaaaataggttgagagggttaagagaacacgtcattgatccttcctgagttcattattcattacgaatgattctaaactccagtctatgagacaaaacatgttcttttttttctgccagaaattgccattttcaggttctcctcaagagatgacatattttctctgtctttattatagcaagcttgttgcttgggaacacaatcagtagatattcaggtttcaatgtatgctaaatgaattacaagtcacattctgttattgaagggaaatcaaagaggaaattaaatgcccttattgtaattgggtcaagcactgaacaagctcatggatcctggagtggggaggaaaacaaagggagaggctgaaattcagagggctctcagaatgatctcatttcttacttgatagaaacagaacttacgcctggagaggtttgtaattcagtctgaagtacctactatgtgcaagcactggacttggcttaggtggcagtcacaacaagcaaagcccttgcaatattgtgcttagtgtctagaggtggggcagacatgaaaagctacacacacacacacacacacacacacacacacacacacacacacacacacacagcagtctacattccaaggggcatggctgaagaggacagggtgctctgaaaccaactaatgaaggaaaccttgtttggaatgagtgtcaaggaaggcttactaagtaagaaataacaaagctgaggcttaaaggataaagaaaaatgatcacatcagagaaatgggggtgggtggcgaggggagtgctctaggcagggaagctctagtttgggagcaaaggccaggagctggcctagatcctggctcagctgaagaactacaagatgtcactgtgctgcggttcggcaagtggtagggacagcagcagagcaagatgaggccaatcccaagggttttagacatcaagtgaagtatgttaggtattaacacaggacaatagaaagtcatcgaagggtttacattaggggaagctgggtgaagcatgcatggggcttgcttatatgttctttgcacttcctgtgaatctattatataattaaaaaaaatagtacggagggaggcaataagatttttcaaacatcttgctggcttctgcatgatgaatggaattgggtaggaagcgacaaagtttgaggttattgcagtgatgtgggcaagagaagagcatggtagtagtgaagatggagagagctagtgttacattgtgaaggtctgattgagggaacaggtgactgattggatgtggcaggccagggagaggcatcaggtgtgaggtccaggtttctggcttgggcacctggtatggatggagatccacttgttaagtggattaaactgggggcataagagcagggggcaaaggcagaattgagtgttgggtgtgtgaagttaaagttgcctacaagatgtttcagtggagactctgagtagctagctggatgcatgcgactgaagttattaaatgccaattaagtaagaaacatcaataacagtcataaaaaatggattgaggtttctggatctacattttgctactgttctaagagaaaaagatttaggtttcaactggttgggatatatctttgtgttttcattatggatgtcagtaacctccatttttgctatcaacagtatcagatttattctgctgacaataaaggaggtatctctgcacagggattttaatcagcttgttgcacctgtgataggacattgtatccatattcaaatacttgaataaacgcccttgcagccaatcttagtttgtgttttgctgttactgaagcacactgtaaaatttagacccaatcacatatttttatagaagttctatttgtaaagccttacatttttgctgttctttttcaagttgagacttgtacttattaatttatttcacggtttaatttccttccacatctataagcaattttatgtttcattatctgaacttttatgccattgttttccacttcagtcctagttaatgggtctcttaactttttatgttgtgggcttccatttagtatttttcaacccgtttagtaatatctgcaagacaaaggaaaaattcttactcctctctattttttcctcagcaataatgagtcttttgcattttcggattcctagaaataaatgctgcctaggaagcattttgttcggtcaactttgacctcatcccattctctataggggtcaggcagtcagggatgataatataatttatcatccaaataagaacaaatttgagagagaaaggggatgctaaccagactggagtcagagacaaaacgagaaaacctggctgttctgggcacatggggctgtacagtcgctctaatgaggactgctctgtgcaaatatgacttgctgcttataaaccctgttaaataagatcatgataagaaggcagacctcagggcctgaggagcatgccaataacgaaagcacagagctgaacggggtcagcagaggacgaatccttctaattcctaatgttgagtccaactgatgcttgtgtgattttctggctctctgtctatcagctcctccctctgttcacagcagacactctgaggtctagctcaccctttgtgttaagtgttaactcttttgtaaaagttctcaagctcctctccatgcactcctagtctgtaacatgaagtagccctggattctagtcatttttggggagtatgccgtctgcctcatgacaattttatttttggcttcccaagttccttaaaagaacattgatggcagagatcctagctcattttccctccacctaaaagagctctctctcaacccataacacttacaagatgtgagcaggtaacctcggggatgacaaatactactgtttgccacgatctccaatctaagaggtttgtggaaatacatttttttcacatctgtgtattatttccctatttgctttatttaaatacttggacacattttcctctttgaaaaatatttgactatcttctgcttccccacattacttaggtttgtttatgtctactagaaatttgatagacaataaaaaacatttattgagcacctagtatatcctgagaaaaatgctgattagggttgaccataccagatgaagtttgcacaggcaacattatctcataaggtggattctgttatcaacagagtgatctgggggccttacgtgaggccagattgtcagggacggctctaatttggcaagtcaaatccgagaggactgagagagacatacttatttttttgagcatttctaggacatttcactccctagagataaacccacgtgtgacatccacttcctggttctccttgctccaaagcacgtggctcttctagactctggaggcttttgccatcacaaatgaaaacgaaggcagatgctatcagtcagaagcaagaagagaaaggtgtgaggacaacatgagagggtgccgcagggactgtccctgtccaggtaaaggctctatggagggcatagaagatacatggcaccctgcagggcaggacattctgaacaccatgaaagcaacattataggtgagaggggccctgaaggatgcctggaggagggctgggggacacatgcctggtgtgggggtggtaagaggtcactctgaagtgggaggatgatggcaagaagaccatgaccatgtgtgaggttattagtgttcaccatgatgtggggtgggtgatatctagccctaagccagattctcggggcaactcagcctcagcctcctgagtagctgggattacaggtgcctgttaccacgcctggctaatttttgtagttgttttttagtagagatggggtttcaccacgttggccaggcttgttttcataattttatactaacatttatttatattcatagaaaatattttatattaatctactttaatatttttgtccagtgcatttaagatattgaaacagaggtccaggaagattagcttgcctgtggtctcagagccagtaagtaaaggaaccaggccagtgagggctccacagagcagccccattctgtcttggcctcaccatggactcctgtggctggaggttgaaagcaaaggggactaggtgaattctgaactgtggcagtttcagtgagaagaggactgctgggacactgggtggatgctaacagacactgggggaaacctttatctggggatgccagtgaaggggaataataggagtcacctcttagacaagtgttggcaaaggagatgggaggatttcaggtttctgagactaacttctcttctcaagagggttatatccttattgttgatcttggcccttgtcaaaatcttctggggaagaattctttttacctccagggctcaccatgacagaactatgtaaaggaagtagctgtctgggttaggtctgggtaggagcgaacatcgctgaagattcgcctggcagagcgggcaaacctactggtgctgttggatgctggtggaagatccaagctcagctgcctgttctcagaatcaggtggctgaaatgtggttcctgggactgagttttggcaaggcaactgtgccttctggatgtgcacacatgcatacatgtgcctgtctagctacaatttcaaagtgacagcaaacaaacaagagtagccatcagacccaacgctggctgagctgctaggagatacaatgcaggtagtatatgcatctaaacttctggttcttaggaatggaagtttaaatgtggagtgcagatggtgatgctggtcaaagtgaggaagtgatttatcttctggacagctgccttggcttccagatctcactagaatgggcaggtcttttctagaggtctgtgacatacaattttaggggaaaaaatagaaagtaaatcgccactaataagtgctaagttcgaaaagtgccagttgacttgtctttccagatagttccagccttggtggaatttaatgcagaagagatgacatgtcagagtgactggagcatgaggcgatcgtatgcacacgatgaagctttgcataaaggtgatactgacgtagctccttatcacagcctagactatttaggttctgcttggacaatggatcaagtttcctagcacaaaaaagacctgtgtgcgcagaaaccgctgcttcgtggtccaatccctccaccagatgaaagcactaagtactgcaggttccatcatgactctgtggcctgctcatctgggctttggtcattcacatgttcctggaactcatctcacagggcaatttcaatgcaggccagaccttgagcaaggccaagatggcgatgtccattaatggctttcatctttggctcagcaggtggatactgggattagtcatttcctattttgttcagtttgccaaatacattctggacctttaaaaagtccttatgctatcgcaatatgatgctttggtagagtcctgtccactttccactggccttggcaggtggttgagtaatatgaaagcaactagcgcctaaattgtgaaatacaaatgttactttgtttttgtagaaagaccagatgaaaataacacaaaatgttttggtatttttgttaaaaatgcaatctgggcttgaagaacttaaatctaagtctggctttatgtttcatttaaacctttttttacttaggcaaaatagcaatatttgaaggtaaaaacaggtttgtaatgattaggaaagattctcctaatttcttaattgcactttgcaaaccaattatacaagagaaagctgaaccagttctgaatgtgttattattgttatcaggatttttacctctcaagtgaacagtgctttacgatttatatgtgaaagtgctttcgcatgtaatgtataataatcacacagtcttctttgaaatgccttgaactttaagaacaaatccaggttgaaagaagaggtactcagagaaataatgtgaatcagatctctccagagaatcagatctctctactggaatccttgcgtgcagggttttctagcgtgcagatgaccatatctgggggcctaacattctagccactatctggtctgcttcttaaacatggtcttgttttaattaacacaaccttttggctgcagatctggtggggatggaattgggaagtgccaagggaccttgaatgatcacacatgatttttctccgtgtagaaacaacaggctaagagagtctcctgagaaaagctgggcttgtgagataaccagccctactcggagaagctttggaaaaagaaaaacaaaaactcaactttacaactgtatatctggaccaaacacctgagggactgtcggtaaatcctttactatatgacactgcccatgcctggaaatgagggatagcgtatactccaaggaacaacatctcttgtagggtttcacttcctgaaaagctactgaagaaaaaaaccattgaagtcatgggacaaagggctattcctctgagttaaataacaatgtcccctggagggagaattccacttcttctgccaaccagcaaccctgctggcagctgtgtttgagaaaagcgtgcctatcaactaatgatgcctaacccctctcctggctcctgaatggagagtctgtgttggtggtattgatacccaccattaacaaaaacttcgcttactttcaaaaatgtagatccttttatgaattcttcatcataacaaaggcaatggtttcccatttttgtcttaattgtatgtttgcccaaatttgatggatcatgttttggtttttatataattttctttttccagatttccatttagggtcctcaggctgaaactaggcatatcccatggcccaggctggttggacacaactaaatctacataaatctccattgagtctccgaggagattcgatgagaaaatattttaggaaacagcgttatgagtctctgtgctcagtgatatttaagttggctgaccatttcaattttggaaattatagtccattaacatgaaaaaaaggcaattacatgtttgtatatttctacctatgcttgtgctttttgcaaatgtttataaagagtggcatgataaaataaaataattttgtgtttgcttctggtgacagtaaaattttatttataaaatacaattactggccaggctcgctggcttatgcctataatgctaacactttggaaggccaaggcagggggatcacctgaggtcagaagtttgagaccatcctggccaacgcggtgaaaccccgtctctactaaaaatgcaaaaaatagctgggcatggtggcacacacttgtagtcccaactactcaggaggctgaggcaggagaatcgcttgaacccgggaggcggaggttgcagtgggccaagatcgcgccactgaacttcagcctggcaacagaacaagactctgtctcaaaaaaaaaaaaggcaattacttaactaaaagctttaggatggttaaacaaacaaaccaacccttctgctgaacatttgagtttcactgattatgatgggaggttcaaatatatgattacttcatatacggatatgaaaaaggtctgataggcagttttcaattagagttattgttctgtttccatattaatagaaaccaattagttattatgaacagattgggtatttagctcaggtacaacataaaatgcaagactaaaaagaaaaacgaacatacagtattctttttttctgtgttgctatgaggtttaatatatttaatatatactttttgtatggtccattggggcaagggatttcctggcattgaaaatttactcaaaatatctgtggttaagttatcataacgaatattactaatgtctaattcattaagaccaacaagccagcatcttacatgatgtttggtacttagtaggtatttgagactatactcagttttttgcaaaaactgtctagctcttgtttgcctacaaataacattgacaatacagttcatttctaatgtaggagaaacttcattttggagccttgcccctcaaacctggtcctgattactgcttcaactcctgtttatataattctacacaattttggcaggattcaagagcacataccagggtgttggcttttatgaatctcctgggatgtgaatgtcacgctgactggatgaaccctggccacaaatcccagacaagcacaatgattctatttattcagacttggctgcctgaatgcagattgactctgtgggtaataaattttcacaggccaagagcgtcaggatcaaccaagctgatcctgagaagaaaaatgcaactaaggaagtagagttgggctgcaaaaacctcctatgtttttattccatgtctgcatatcattcagctaattcatttagttactgattgacatgtactgtcaatgctttcagacattttaaaagctctgctttgtgttatgcaattgtcatattaaaaagaaacaagggaaaaaatgaagagcttccattacaattggcaatctgcttttaagagtacacccaaaactgatgtgagtcatccagtaatctctgtggtaaagagcacagaattgagatgggaatgtttcttgtgctgctccataggaaaccaaaggaaacagcaataagaactgcaattttgtgctcagagcaacctcacctacaatcttggtatcttgatgaagcaaggctttacattatttctaagagacacgactattactctatgcattataaataagaaaataattggctctttaatttgcagatttatgttaatgatctagatatctattaaattaattgcatgctctccaaatattgattggggattaaaaggcagcttttcattgtgcaagaagtaaattaacgccaatggggaaatttccctctacagattagatccaatgattgttgtctgtaaaattaaaatagtcagttaaaggggataaaccatgttcatttaaagagaaaaatgtggcaacagagttaaaataaaaagactgcccaatatgtttggataacgtaattactggaagctgcaggcatgtacatagccattcaatttagatccctggtcccttcctctccctaagctatgtatttgtcatctccgaaacacttgtctgcagttgacactatctcagctgctccttgctgaaagtcttaatcatgtgtccctgtcctcatgccttagctatagtaatgccatctacttatttgcttgtgtccaacctcccaagcttaccctgacttgagaggcagagctcatctttttgccaaatgggaagacatgcaatataattaatcagtcccttcctaatctattaaatttttttaatacttactgtcttaagtcttctaattccttcacattgtttcacaaaaacattggtctttggaattgttaaaaccaacagttacagaaaggagatcaaacaaattactccaggtatcacatacctttcatttactcagattaaataagaaagctgattctcagatattttgtgctatttccagttggaacctcatccagtgtgaaaatcataggtgcaaccataaggctatgcttccatttcatttatgtttgtaaactttctaaggaaacctggtcacaaccccagcactagaggctacagccaaaatttggttattcttgaaagggaaggctgtggagaaactcagtctcttggttttgaagacttctgtttgagataacttatgaaaacttgtagtttcaatatagcttgatgtaagcatccttaagaaggggctatagacatttccatggagatcggataaatgccttttttctcaaataggttatttgtgtattaatctatagccaatttaagatattgggccttatatttttgtcatctctgtcaatacttttgatgtttggacagaactcatttgaaaaatcatagagttcaggaaaaggaacaaaggcagagcaaaggtcatctttgatattgtacaatggacagtgggaaatactctcaattgaaggcatcactatgcatttatccacgcattcgttcaacaaatatttagcagttctgctgtgccagacacagtccctgccctcaggaaacttccagtttagctggtgtagacagatcttagaaaaagtaaacataacatataactaaaattacgatgagattcaggtaaaaagatgaaggatactgtgagacggactaactgggagttgattagataagagggaggtctccctgaggaagtgaaagttatgctgtgcctccaacatgagtaggtgttagcaaggcaaaagtgagggagtagaggcctatggaggccctaaggcagcagagctcagcttcctgcaggagctgggagaagggccgggccacaaatgagctcagtgtgaagatgagacgtggacaaagccagatggtgcagggtagtgtcggccatgctgagggctccgaatttgatcccgggtgggatgggaaacctatttaagattttagaccaaggaattacttgatctgatttttaaaagatcactgtggggaggctgtattacagagggcaggaaatagaaatacaatagtttataccagactggttttgactagctgggaatggaaagaggtagatggaccaatatttaattttggaggctgagtttataggacttagagatgaagtgactacctgagtgaggaacagggaatcatcaaggatgagtctgaagtttctaggctggaacagctgggcatctggcagtgctagttttggaaatgggaacaataacaagacgaacatgtttgtgtgtctgggtagtgatggcaaaggccagaagtccagttgggcacagactgaatctgaaatgtctgtgagacatccaagtggaaaagtaaagtaggtttgcggttcagaagagagttctgagctggggatataactttagaaattgtcagtatataaaaattgaaggtcataggaatgggtgagatcacccagagagcagacatggagaagaaaagtcaggaataaacatggaaagtttccaacattgggcagaaaatcagagtcagcaaaagagcctgagaagagaagccagaggggcaggacccaaaccaggagagtgtggtgttagactcctacagagaagtgggtgatgaacagtgttcaatgctgtaagtcttctagtaagacaggggactgaaaagagcccagtataattggctctacagaggtcattgggggcccaatgaggagcatttctggtaaagagatggggtcataatgagatcaaaagaacaagtctctatgtagctctgaggaaatggatgaactttggataggagcagggcagtgtcctctcacaacaggaggacacaggatgagtgaagatggaagcagtggtgcagatgtggtattgagaagtttaggtttctctgctagaagccagtcagccatggtatgaggtagggaaataaagatgaataagatacacggtgaaattcaggttgtttacttatgaagttgggaagacagaaaactacatttgtatcacctattattattcattctgtaacaaaggtaattataggatattaagggagaaagcatgcaaaatgacagtaccagcgaactgttataagttatgtatatatagtgtaatacctagaatagccactaaaaaagctgtacaaagagatacacataaaaatgttacagacaaatcaaaacagaattcaaaaggtttaaggaatacacagaaaggcaggaaaaagaaaattaaaaccaggaagaaactaaacaaaaaatagagtggtagacttaagctttaacaaatcaataattacattaaatgtaaatggtctaaatgtatcaattaaaacacagaaattggcaaagtgaataaaaatatgacaactattaatttatgctgtatataagaaactcatttcaaatataaccatattggtaggctgaaagtaaaagaatggaaaaaagttacattatgaaagcattaatcaaaataaagcaggagtagctgtgctgttatcagaaaaagtagacctcagagcaaagaaaatgaccagagacagagtgggacattacataatgatagaagggtcaatctaagaaaatatagcaatcctaaatgtacacacaccaactaacagagctgtgaaatatgtgaaaacaacccgattgaatagaaagaagaaataaacaaatccacaatgacagccagagacttcaacacctctctctcaacattagatagagcaatgagacagaaagtccagaaaagatacaaaagaacatcaaataagattaattgatattaatagaacaccctacccaacaacagcagaatacacattcttttaagtgcctataaaacatataccaatacaaaccatatcttgggtcataaaaaatcctcaacaaatgtataagaattgaagtcatacagactatgttctctgaccataaaggaaccaaactagaaaccaataaaagttaagattaagggcgatctctgagcacttaaaaattaaacaacacatttctaaataatccatgagtcaaagaagtcttactgaactgaatgacgatgaaatacaacacatcaatatttgtgggataaagtttatagcattgctgagagtcaaatgtatagcactaaatacttatatcataaaaaagaacgaatctcaaatcaataatctaatctccctcaagaaactagaaaatgggcaaaaatgtacccaaagcaagcaagaggagggaaataaagataagaaatcagtgaaactgaaacagaaaaaacaaatagataatattaatgaaacaacaagctagttctttcaaaagatcaatacagttaataaacctctagcaagactgatataaaaaagaaagaagacaaatgatgagtatcactaatgaaacgggctgacactatagatcttgcagtcatcaaaaggataataaaggaatattataaacaaccctatccacataaacatgacaacttaagtgacacggatagacttattactgaagaacagtgtaccacttatacccagtatgaaacagataatctaatagccctatgactattagataatctgagtagctctataactattaatattttttttttggctgggcgtggtggctcacacctgtaatcccagcactttgggaggccgaggcgggtagatcatgaggtcaggagatcgagaccatcctggctaacacagtgaaaccccgtctctactaaaaaaatataaaaaattagccaggcatggtggtgggcgcctgtagtcccagctactcaggaggctgaggcaggcgaatggcgtgaacccaggaggcagagcttgcagtgagccaagactgcgccactgcactccagcctgggtgacacagtgagactccatctcccaaaaaaaaaaatttgtttttgtttttctccccgagatggagtcatgctgtcacccgggctggagtgcagtggcttgatcatagctcacggcaatctcagcctcttgggttcaagcaatactcccgtctcagcctcccgagtagctgggattacacgtgcacaccactatgcccaactaatttttgtatttttagtagagactggttttcactatgttggccaggctggtctcgaactcctgacctcatgatctgctctcctcagcctcccaaagtgctgggattacaggcatgagccaccacaccccgccgggaaatagaatttttaagtttaaaaatctccaggcccatatggttttactagagaattctgctaaataattatcatctttttgtttttgtttttgttttgtttttttttcgagaaggaatctcactctgtcacccaggctggagtgtagtggcacaattttggctcactgcaacctccgcctcccaggttcaagcgattctcctgcctcagcatcctaagtagctaggattacaggcacatgcaccacgcctggctaatttttgtatttttggtagagagggggtttcttcatgttggtcaggctggtcttgaactcctgacctcagatgatccacctgccttggcctcccaaagtgctgggattacaggcctgagccactgtggccgacctaacatcattttttaaaagcataatctttttgagaaaagggcaggggacccttcttaattcattttataagatcagtattaccctgatatcaaaactagccaaagacagtataaaacagaaaacttccaactaatatccctcatgaacattaaaaagacaaatgtgtggtgaggatgtagagcaactgaaattctcttacactgctggtgggactttcgactggtacaaccattttggaaaatggtttgagataatttactaaagttgaacatgcacataccctactgctcagcatttatacttctgggcatagatccaacaaaaatgttcccatgtgctcaacaaaagacctgtacaaggatgaaaagacctgtacaaggataaaaagacctgtacaaggatgctgataagagcacactattctactccccgacccctgccaaaatatccacatgcccattagcagtggaatgaataagtaaattatggcatacacacataatgaaataggatacagcaatgaaaatgaacaaacttcaattacaggtaacaacatgggtgactctcataaacaatgttgaatgaaagaagcaagacacaaagagtacatgccgaataattccattgatacaaagtgcaaaaataagcaaaattacactatggtgttagaaaacaggaaagtggttattcttctgcagagtggtgactggtgggagcatgggggcacctgggtcatgtctgtattttcatctggatattggttatgtcatacacatataaaatcatttttaaagacatatcatttttataaatcatatacaaacaggctgggcacagttgctcacacctgtaatcccagcactttgggaggccgaggcgggtggatcacttgaggtcagaattttgagaccactctggccaacatggtgaaaccccgtctctagtgaaaatacaaaaattacctgtaatcccagctacttaggaggccgaggcagcagaatcacttgaacctgggaggcggaggttgcagtgagccaaggtcatgccactgcactccagcctgggcgacaagagtgaaactccgtacacacacaaaatatgcctattggatctggtgacacgaagatgatgggtgacctcaaatttcgatgaagtggcagcttggggatctagcattaattccaattttacaaacagagacactgaagcagagaacagttcagaggctgggccaaggttgcaaaactaagtagcagagtggggatttgaacccttgaagtggggccgctgtgctcttaaccactaaactagactgtcttttgaccttcaggatcacaaaggcaatggggagaaaaggaaacctcagataggagtgttcaaaagcatggagtctgaggcgatctgaggaagggcaggcaggtatagcaacttgaagctcttgtagacacctctttattacagtggcacatgggctggttgaaccaatattcacaaagacagccagatataatgtcagaaaaggttaaggatttttcatacactgtagtgtttactgaggcaagggatttttaaaatattttgggtttacggtgcaaactctgattacatctagaaaaatcatttatgttaaatgttcaattatctcagaatgccagggaatgagtgtatgtgtctgtgtgtgtgtgtgtgtgtgttcgtgcaccggctatgctgcttccgggataaagcatagtttggtcttgaagagaaaaaaataccatatcattagtcttgtttaaaagtatgggaattacaactttgtgattagaccaggttataattataggccaaagcaggacaacttaatgcaattactgttgaagcaataacttaaactatcatacgcaaaaccactgtctggagtcttaattaggaaaaagggattaatgtataaaaattattcattctgtcagttccttttattgcaaaaataggaaggtatattcacataggaattaaatgcaagaataaaggatctgacctgtacattcataacacaatattatcaatgagtacagaatggaagggggtagcttaaaaagcaaaatgagtcaactaaaagctcttactgccttagagaacatgtatagtacgtcattagtaatgtttattaaaattgagttttcattggaaatacttcctggaaatagctcaggaaattatttccaaatttaaaaaggtttgcagattgaaatagtctgtgaaccctttttctaataaaaagcatacacaatttacatgtttgatatgatttaatccataatctatgtatccaggccacttaatgggaaaaaacacaaagagttgaaatcatttgcttatcatcatgtagataagaagccaaaattaggagtgaagtcattctacatttctgctaagattgctgtgtggcagatatctggctgccctggaaacaaatcaacagatctgtaaaacactcgaagcctgagtggccttctttgcccagttaaccttcttccactgggtattctccacctgccaatctggtttccagactcctcaagctcttctccctttttcgtgcctcagtttctcccatgacatgagtaacctcttctgtgacctcatagctatgctctgctcactcttcctcgaaattctcctttgacttttatttaacctctgcttgttctctctgtaagttatttgtatttgcatgtctagacagcaaatcatctgcatagcatttcatgatacctttctattaattcactattccaaaaccaacagaacagcattattattttgtactgcatacaaaaatgacttattaaaaaaagcctctctgaattgtctttctacccatcacatgtatctaaacttgacaaaatacaacataggggatgagaaaaagaaaacagaagtgtagaaaaatctgtctttagtgtttttaaacttgctttgaaatacaaacatttcttgaaatgcagaagtgaaagtgatgaatgttaagtggatattttttcaccttaactgactgatcagaagagtatttataaccccctaactgatgtctcgagctgataaatcaacaccaggggagaatatttcaagcacatttatcatttaagacaaacagcctatactgagcataattactttttattcatcattttggctcacctctacatttgctccttctcaatgttaataatatctgtgtaagacttctcaatatttaatgttacggattgcctgttgcatgctgatgaggttaaggtcatatgtttgatctccagaaggccagttagcttctcacacacacacacacacacacacacacacacacacacacacacacacacacacatgaataaataaaaaagaaaaaaaaaaggctctgtctacttctgagggaagcctgatcttagcttccttgtaatacccattgctggtctcaatatcataaaaaattacagaattcaaggcttaagggaaattatgggcaagctattttaatatactgacccaactgcatagaagctcacacttagcagacaaaagaccagcagcctggagtgccaccattcagcttggttaacacccggcacagtccaccaggtaactgttaccagtgtcacctccaaaggatgatgacataaaagagaatcttacctgttcattctcctcttcatcactgcttagcttaaggtcatcttccagcattctgaaagaaggaacaaagaggtacaaagaggtacagatagttagtggattcagaataattcagcaccaaaatatcaccttaatgttgttattagagcaacattttggaaataagtctatttgatttcctattttttttctttccttcttatgcacttttcctctggtgcacttaggaaatagtagacagccccatcataaaaattaaccctcacaacagtcatcagctaagacgggcagctttcagaagatgctgtgttagcagggaaataatacttaacaataacgtattgtatatttcgaaatagctagaagggaagaattggaatgttcccaacaggaagaaaagataaatatttgaggtgacgaatatcctagttaccctgatttgatcattacacattgaatccctgtatcaaaatatcacacgtacctgaaaatagcaataaaaaagaagatgctttttttttttttctctcaaatacataggggcttttcccctgggcagtttgcattccacaattacttgtttagtgttttccaagctcccagtgctgggctgtgtctccgtgcctgccccaggggctttcatggtaaagagagatgagaaaaagagccataaagccataaacttgagttgtgagcgaagcttcttaggccatccatcagtcaaagagctggaaaagatgttgtccccaagatcctacctagtggggaaaaccaagcaggagggcgctttctgaaaagcctgtgaaggtgattccccagcccacccaggtccccccattcatcctgaggagacagcggggaagcacgaggttaaaagtgaaaaaaagaaacagaacttcagactctgttatttgttatgataacactgtattcttttcagcatggctaaatttttctttatagtagttttcagattaattcatttcaaaagaaatcttactcagaagtgcactgtataaaagcgtgctctccacgcagagacgctctgagggagcaggggagagcccacttctgagggaccctggggctccatacatcagtgtgaagcccgctgagcccttgtgctcaaaggcctcattgaagccagcttccaaaggctgtcccctaaaatgtacctagtgtcctttaaaagccggttgtaggcctatcactgatacatgcctctgaacattcgtaggagtcatttcagtcacttttggggcgaactggggggtaaagaactggcaggataaggcatggcccaggctctgccccacctgtctatgcatgtggggtgagtcgcttcacgcaccctgaccccatttccctatttgtgcagtgacgtgttatagagggcaatcctaaggttgaatcctgctttagattccgttgtgagtctacaaaataaatatgctccccagtttcgtcaaggagaaaaacccttctatttgctctagagaatacaacggagaaacttctaagtagtttttagggtactatttaaggcattgccatcagggcaccaaatctgcttcctcacaggctcctgctcatctcccagtgccgagaggtgtcgttcttctattatttaaaccacaagtgaacaaatgaacacgtcagcagaggctgtaaagcggcacccccaattcctctgcatgtctggcacgccattcatttccttcacctcacagacacatacgcttggcttcaaagagaagagacctcttggtgatttattagagcactgtttgggagtagcctagggaagtgggctgtgtttcctttgtccttgagtccccagtgaccagcacagtgcggcacagaacacaacgccagtttgctggctgggatgaggccccttccccaagactgttttcctacccaaaggcacagatttcttcctaatgaaaaagaccagagaaggggacaggtccttgcctccactcccatgccctcttttgggtaaaccaccactgcagtgtggtttaatctctaggactgcccagcaagcactgggtctttaaagggtgggtggtcctgctggtgggggtggaaagagtggggaggactcacacaatcatggttaacaacccccttgctgtcagatggaggctgtgtggctgggaaatttaatgtttaaatggacaatactgtgcgtggattggaaggccatcatcccccagagcaggaaagcccaacatggcccgaagtgagggagcttgggttggctgcaaactagccgtgcaactcagtcaccacatgagcctggcatggctgaaagtcaccacaacggtcaaaatgctgctgtgtgaggctctctttcaaggtagggaatgcagcttacttctgtttatttcaaacatgtgctaaacgcgtccacacgtaaacacgcatctgtttgaatctcagagccccttgcaccacaatcttgtgtgaggtgcacctctggggctgagcatttgtgcttctataatgagactcatctatctcatcatcatttccagaagaaaagcagtcagagttcaaccttgctttgtgaataatcatcactctgtcactgactttacctctcttatattaaaaaaatgaatttattgtgtttccggctgggttctaaatacaacaaatcacatgtaaaaatacactgccttcaagagagacttcaagagaagttcaaatctaactaaacttcagaatatttcgaaatatgagaaagtggccatggaaacacaaactcacacagcttatacaacattcccggagcaatcctgggtgatgctattcccaaaacatgaaatcacagacctgggagagacgaccacggccataccgcatcccagccccgacaggcacagaggtacaccctgaggagacccaggctccccgcggtctgagagcaggaaccctttgctttattctgatggtcatgagcaggcccttggctcaactccctagcaaacggcgcttgttcttgtctgtgaccactgcatcttcaagtccggtttaacattcacaaacaactccatgttgaatgctgaacatatccaagtggcctcttagagagcctaaggaggggctgaagtttatagctgaacaatgaaacatggttaggagaagagaaaacccgtgacactcacaggatcataggaactgtctgtacttggtgtatggccagcagacagcaggcatggccgccttcaccaaacacacaaatggcaccgtggtggtcatgggcccaacccactcccaaaccctggggaacatttttatcatttgtctgtttccctgtggaaacataggtatatcaaacaataaataaacaaacaaaagtgttcaaccaagagtaaaaggaagatgcaaattaagtgctgattaggctactggggaggggtggagatctcctactgtttttttttttttttaaagggaaggcaaagaccctgctgctctaaggggctcctgagggctaagtcatctgcacggaaggactagccatctgcatggaagcacagggcctgtgcatccatccacagcaccctggttacacccctactcctgggttcctccaggccctaccccagctgatggggcccccaaccagggccacccctttcacgttcccttagcccctccccttcatagctcttcagatccctcccaggggatgaagccctcaactcacagcagcagctctcattgtttaagggatgtccgtccgtagcagaccagctaagtactttctagatgttactttgtcaatccctgcagcaactcctccaaggtgggaggtgggtgctacagggggctgtggaccgtggtagtcagagcagggactccagcgtcacactgcccaggaagaatgctagctctgcctttcatctagcccagggccctgggacctgcctcagagggcttcctggagaacttactccacaatccttggatagtgctaagcacgggaccttacgccagggagcctccaatcaatgctcatttttatcaatgctcatttttaccaatattcccttttccctaggagggaagtgggcctcagagcatttaagaaactcatgtggataaacaagttgagactttgagatgtctttgtaatgatgccttaaaacagggccatttgctctattttcaggccattttgaaaagaaagggtcatgttcctgagagatggtggaggggaatatattttggcctgtaactgctgtcagctggtctgagtggctttatgtcgacaggacagtaaacacgcctatcagccccagtgcacggagaggtctgccctgggagctagcgggtggccacgaggccaggagtccctccacgaggagccaagggggtgttgccagatgacaatggggaagttgaaataaaataggtactaaaattgaactttttggctgcacgcggtggcttgttcctgtaatcccagtattttgggaggccaaggctggcggatcattgagcccaagagttcgagatcagcccgggcaatatagcaaaatactgtctctataaaaaatatataaaaattagacagacatggtggtatggacctgtaaacccagctactagggaggctgaggtaggaggatcacctgagccctggaggtcaaggctagagtgagccgaggttgtaccactgcactccagcctgggcataagaccctgtctcaaaaaaaaaaaaaaaaaaaaattgaactttttgaattgagaacagacctggacttcatggccttaacacttgaagagttatcaaactactgtcagggatactccacgttagcacctcatggtgactttacagtagagtctgaaccagctacatgagaactgtgacactttaaggacagaagcaagattttttttaacgtgcgattaagcgattgagattccacctatttttacttgggaacttgtccttacaatgattgttgggcatgttgtaacacccttcctgacacgcagacaaggagtcgaagggttatgagcccccagctgcactcgctcacgctttcatgcagggagagcgggccttgcaggagctccgtagaggaaaggacacaatgggactttcattcagaactctaaagagggagccaaagataaacaggcccatttgcagtttgccgagcactaccctggaggacctttttctttctgaaagggaaagatgaatggaaacatgcctcatcaccaccagcggaaccagtatccaaactcccaattgttgttttgttttgttttagagacagggtcttgctctgtcatctaggctggagtgcagtggcccaatcatagctcactgcagccttgaactcctaggctcaagcaatcgtcccacctcagcctcccatgtatctgggactacagacgccggctaccacgcctggccaaacccccaactgttgactcattcaattacttctgtgtccactgtgtggcaggcacctatccacagaaggtgtactgtctcccaggggtggttcccctcacacacgacattcaaatcagcattgtcattttacgtatttttaaatgccttcgaattgtgaagctctggcaaatacaacttttgcagaacccaactgtgtcatttgaaggtaaactcagtacttttcagaaaagggagtaattcagtacaacctttgcaattttaacatttgattaccataacttccctgtgtgtattgttttcttaattgagcaagtgataaatttatgttgtagctggcgcctgcatttttgaggcctaaaatttcttgggaagcagaaatagcagcctacacttaacagatggccaactgcttccaaagctcatctatatcttccacaggtattgcaaacgggcacgttaactacctgcaaatgtaatggcagccatttcacagagtagtggtttttaattaataggattttccctgaattagttgtcatttggggcccttaacagatcggaatcctttagtcctttaaagtcatttcattttgctttgttttaatggttttttaaaaaatctgagttttaattgggctgtttgattttcagatttgtttctatagctggtgctgctactatctccacctacgtgagatttaaagcctaagacaaatgtttatgaatctccattaaacatattcatatatgcaaatgtctattctaacaattagcattgcctgagagcctattcattatgcaagtgcatctctctgcagttattccccaagccatcatctccactgcttggaacacgggagggaaagttatacaactcatttcattctttctgaagtctactgctttgtcagggtcagtgctaccatctgcctgtggttattttcattaacaagtaaccaccttcttctcagcgtttgttcggaagaacttagctcatgccatcccagctaactgggaacagggaaggctagcatgggctcactctaggggttggcaatttagtgcatccaaggcacaggtgaactcacttagtctggaggcaaatggagaaatcaggaacaagatgaaggggtgctctacttgacctaagtgtttccaactctgatgttttaaaacccagggatctctacatcttttgaagcaattttggtccatagcaaggtggtatttgctcacacatatctccttcctggactccctccctcccggggagggattgtcagtgaaatcatccatgatcctgtaactctgccatgttgaacctggggtgaaggtgcactgtctcgcttaagtttatgaccttatttttagttagggacagcaacttctgatggtccttttctccactgacatgctgaatccacttgccaccttctctgcaggcccatcttccctgggggacggcatctcatctcctaccctagaagaacctcacaaaagccagtctcatttgggaaacctgccaaatcctggtgagatgctggatgatgtgtgtcttcaaaatctcaatcagtcaactgtctttcccaacagtaagcatatctatagtaatagaaaataagcagaaataaaaggaaaatggaaatcaacagtcataagaagaaacagtcagtggtacagagtctggggtggtgaaataaattttgaaatggcagcttggaggctagccagcattagcctgaattctgtccctaactagctctgtgaacttaggcaaatcacccacttcccctagacattgtttccacatctccaaagtgagagttggataaaacaaccactatatatcctcttattggtctgaattccttggttctgtgcctttaccaatgggtagaatgtccaggaagactgctggagaatgagatgatctgatactactcagcacattctaggtgctagagatataaaactggagaagtcttccttttcaagtgtctcactgtttactgggagcagcagcagttccttgaacatcccatgatgctttccagctagaaatatgtaagtgccacacacggtttgtgtgattgtgaaaatataaaaatgctccatcttttccacttagggcaatctaggccacagttatgaagtagcattctccaaatatattagactttaaaattgcttcctcctaaaagaattacagggaaagagggctggatatactctatcatttctatcaaaaaactgaggctttagaaagagcactttaacccggagtgctttctccctgaagatgggtttaaatcctgtctttgtctgttttaaggacttctagaaaattagtttctgagctcgatgttctcagtattaaagaattgagtttctaaggctaaatgaatgcaagtagtgtgtgaaagaacatgatcctttcccgggcagacagcagaggacaggtcagaggattctgactgggaacataaagtttctgtggctgtacagatttggtggtggacattacttaaacctctttgaagggggatgtgcacctaaccagaggggaaatgagatatgtacgtatttatatggctcaaatctgatgttgaatattgataatcagtaaataagtaagttagctgcctattctgtttgctagctaatggtgtgcttatttaataacttctgacaataagaatgcattgaatctgtaagggtcataacatacatcaggttaagatttgttctttggttggaaacatcagtttttgcatttttatggctgctgttattgataagttaattgctaaaagagtccctaattaagagatttgaacagataaactgttagaattagaaaagagaaccaagcataatctcctaattagcaaatccatgcactttaagctataccagcgttcacacattacctgaggatggcataacacagtggtttccaaactttattgcacattggcatcacttgggaatctttaaaaattattgatgcccagctccactccaaccccatattctgacgggataggtttggggtgcaatctgggcatcaggtttttttttcttttctttttttaaagctccctagggagctgattcatgggcctcagccccagatattctgattcacagcaatgttgggacccactatataacacagagctggactgactcataagagctgaaggtcatgaatagctctgcaccttggatcaagtcccatactctaagttttagtttgttcattaatataaggggatgatagttgagattcaaatgagacaataaaggtgaaagcccattgtaaactgtaaagcttcataggagttttcagtaatgggtttagcattacctgggatgttttgaaagatactggtctatgggccttaccccctgggattctgatttaattggttttggattggccacaggcatcaggacttctgacaagctgctatggtctgaatgttccgtgttccctcaaaattcacatattgaaacctaaccttaaatgtgatagtattcagagatggggcctttgggaggtgattagctcatgatggcagagctttcatgaatgggattagtgcccctgtaagagagacctcaaagagctctttcgactttgtgtcctttccaccgtatgaggacccagctcgtaggtgctgttgatgaaccagaaagcagtttctcaacagacaccacatctcgttccttgatcttggactccccgtcccccagaactgtgaggaataaattactgtcattcagcagcttcccaatttattttgttactttagcctgaggtatttttttttttacagtagcctgaataaactaagacatgaacatcctaagtgaatcttctattcagccagggttgagaaccactgccttaattctattttttttttttttttgagacggagtctcgttctgtcatccaggctggagtgcaatggtgcatcttggctcactgcaacctctgcctcccgggttcaagcaatgctccctacctcagcctcctgagtagttgggactacaggtgcctgccaccacacccggctcatttttgtatttttagtagagacagggttttgccatgttgaccaggctggtctcgaactcctgacctcaggtgatctgcccgccttggcctcccaaagtgctgggattacaggtgtgagccaccacacctggccactgccttaattctaacggaactatcaccttcctattaaaatcatctccaatccataggacagaattagtcacttcttatctaagtgaataatttgtacataactaatgcattatgttggaattttctaacttatctggcttcactctccccccatcttccattggaataagaatgcttgaagggaaggggtgtgtttcctcaacgcctaggataaggcataagcccatcattactaaggaattaccacgaggcattttagaattcttcagtagttgttttgagaaaccacaaggcagcgctggggaatctgagattccagcttgttcttcagccttggggaggaaacagaaaattttatgaatgccacacctttcaagctccctggagaagtccccacactttcgtcaagactgcataggatagtgtgctgggttttctgtctagtggcaacttggcatcatctcccctttgaagcactcctttctatcacaggggctggaggcctgggaactacatttccccagaatccctgccgatagggtttttggttaaatgttgccagtgagaggcacctgaatagggcttggaaaatcaaagattaacagaagcctttactactcccaggacagtgaagcaggtgcagaagcttcagcagatggcagatacgaggttctgtgagtggcttccaggcacccttctgtgaataatgcctgctggagacatctgagattactgttagcagttttctgttattcttgcatttattgatttcttgaaatgactttctgaactgatggctgatttcctgttggtcccccttccctggccctcctgatgggtttggaaggcactaattccctatgttaagtgtctacttgaaatacctagagtggtttctcttctccagatcaaactgactgatgtgtatagtaattaagagcatgagctctgcagtcagaaagcctggtttattgatttctatccagatgctgtacctcatgctagttgtgtccttatgcaaagaacttaaagttgctctgccttctgtttcctcatctgtaaaatggaaaaacgagagtgtttacctcctaggaatgttgtagaaaatgtagaaaacattttatacagtgtctggtatgtagtaattaataaatattcagtattctaactggaattttattacccattccatctcgtgacaacaactatgttacaatttaagtccatttttccttttctttttctttctttttttttgagacagagtctcactttgttgcccacgctggagtgcagtggtgtgatatcacagctcactgcagccttgacctcccaggctcaagtgatcctcctgcctcagccccccaagtagctggaactataggtggcccaccatgcctggctaatttttgtagggacgagaggttttgttatgttgcccaggctggtctcaaacccctgggctcaagtgatccacctgcctcagcctcccaaagtgctgggattatagccatttactttctctaacagagaagataaacttcttaatttctcgaccacctccgacgagcacattctaggtgccagagatataaaactgaagaagtcttccttttcaagtgtctcactgcttattgggagcagaagcagaaaagaaagccagcgaggtgataaatactatgggagcacagatgaccatcttttttccttgtcagacaatcccggcccttttatttttccttgtagttttattcttcagtctgtagttctcttctgtatctcctacaagttccccagtgtccttccaaatttatagtcacgtgtgggacacagtccactctacaggctctatcggcatggactgtagggggagaatgacccgctttatgttggaagtcaacagctctgagaattaaggcctaagactcataacttaaagctttctccacctaagctcatttagtctctccttccccaaatgtcttgaggaaaaaagccatctgcctccttgttcaggacagccatggggtcatttaagactcatcatggaattttaacaaccttatcctacgctgtgtggaccaagatgaccatctggctcctgtgattgcagtggggaccacattgtacctgggtattacagaggtgcagccatctcccctccccctgcagctgtccagttcctggaaaacgtgctcccaggaccttcagctgcttgtgactagatggaggctttcacactaatccactaatcctctctgccacaaacatcataagcagatcgtataaacgtgaagaggagaaaaagacttcaatgttccatattaaagaaaaagcatcctatgagctatttattggctggagattggtagatgatcctcacactaaggcatttccatgaattcatttttttttttttttgagacaggatctcactttgtcatccaggctggagtgcagtggtgtgatcacagctcactgtagcctcaacctcctggtttccagtgatcctcccacctcggcctcccaaagtgctgcgattacaggcctgagccaccgtgcccagcccatgaattcagctttaatactaccacttttgcagcactttgcatattttctctgatacttccagaatttttcattataaaatgaatccaggtggtttgaatatagaaatcaaataactctaatctcaaaaaaactcactatataccaggactttttctttctttcttttttttttttttggagactgagtcttgctttattgcccaggctgaggtgcagtggtgctatcttggctcaccacaacctccgcctcccatgttcaagtgactctcgtgcttcagcctcccaagtagctgggattacaggtgcccgccaccacacctggctaatttttgtaattttaatagagaccggttttcaccatggtgtggccaggctggtctcaaactactgacctcaagtgatctgcctgcctcagactcccaaagtgctgggattacaggcctgagccacccccctggcctttcttttttaaaaatagagttgaaaattaggccaagtatattgagagttctaaatccattgtcaggtacatacaactggcttttgcaatgagaaacctgattaccctgccaacatgcctctctatacaccaattacattctactgggagttgttcaactcatggtgacacagaatgtgtcaaataatccatgtaaattaagccttgccatatccattgcagaagaggggtgcatttactgggttggaagtggtgtcaccaggaccagtcaaggccactccttaagaaaggttcagcatttcgtcatggttttatatcaggtatatttcgagtttatataaaaaaagagtaaaactgcagaatcaagtcctttgttgccttcctaactttttaaacatattcatctatttctctttcagctggaagaaacgaatcttaagtgcaagaaaaaaaattcctgtgaaaaactctaagtgggaatgtacacttctgagataggatcagactacagaatcgtgttgcttctgcttagtgcttaagaaaataaccaggaaaataacgatctatttagttactatcctggaagtcatggtgtccatactgctaaagtgggtctattcactgatggaggacaggagagtagggataaaaacagacaggatccaggccgggcatggtggctcaaacctgtaatcccagtaggctgtgggaggcggaggcgggcggatcatgaggtcaggagatcgagaccatcctggctaacacagtgaaaccctgtctccactaaaaatacaaaaaaaattagccgggcttggtggtgggtgcctgtggtcccagctactcaggaggctgaagcaggagaatggcatgaacccaggaggtggaggttgctatgagccgagattgcgccactgcactccagcctgggcgacacagcgagactccatctaaaaaagaaagcagacaggatcccagtccaatgcagactttctgactttcctattttagatgagtcaagagtcctgatccacagtttcaattaaaatgacagaaagtcaactgatttcagagccaacaccaaataacactgtgaaggaagttgagtttacctttgaaaacccctaccacttcaggtgcacactccctctccaggactcatactcccatgtagactattcctttctgaccaaggaactggagctattctcatggtctggaatgggtctcctttcctgcctacttgctaaagtgtttctcttctcagtcccataccctttggattagttgtgagccagccatattgcatattgaagagttggtaagatttgactccttctaacaggttcccaagctctattgacctgtaattgcaaaaaaatacaaataaacaaaaccccaacagcaacaaagatcctgagggagtgacattaatggtagaatttttaaggtacagcggtagcccccaaatgggccatttttccttcgtctaatcttattgcatggcaaatatagacagcagcaggcattcctgactgagaaccctggtgatggcctgatggaagcagagatgagactgtctgatccactccaggcagcatggtccctaaagggccctctacagctgggagcctaccctgttctgtaataacagcacatcagcaacctctatcattgtggcaatggtaatcaattatttaagtcatatttcattgattgcctttatgtgccaggcatgttgccagccaatgcaaaccaatgatgaataagaaatggttcctcccttagggagctccagtctggaagggaactcaggctcactgaattttcttatccaggcaacaaactgtcccaggatcttttaaacagtttcctgagtgcaatgagtatgtaacattaaactcagaacaaagagaaggatctaggaatgcaatttcctatgtggccaagagatgtgttcctaccacaaacgtattcctggcttctgaggcactttgatcattgtcacccatgcagccatttttaatagtaaatagctaaatattcagaaataggcacttcacaattatttatttgatttgggtagtgtcaggctagggaaacactaccaggacaccaagacaagaagagaaatgtcccggtatggcaggggccagatgcgggagaaggaggaccagttttatcaaatgagccaggtgggtaatgggagtgagtgggagcttcaagtcatggagaacagacggagtgttctaagaactcagcgaggacactcttcaagccacgaggctgagctcctagaactctaggagacaggagctagaggagaggtgggctctcactggcctgtggaataaagaggctgatgaaccttcccaagcgagggtctcataagcagggaggaaagtatggggcttagagggagaatcaggctggtggccagtcagctgttgttatttataaatatgcttttatagtagttttagatttacagaaaagttaccaagagaacacagagggttctcgaatactccgtgtccagttttccttgtccttaggatctcacagcagaatgatacctttgtcacaatgaatacacctatattgctatgataacgtaagtccatttgaaatggagtcttgctgtcacccaggctggagtgcagcggcgtgatctcagcttactgcgacctccgcctcccaggttcaagctgttctcctgcctcagcttcctgagtagctggaactacaggtgcccgccaccacgcccggctaattttttgtatttttagtagagacagggtttcaccatgttagccaggatggtcttgatctcctgacctcgtgatccgcccgcctcggcctcccaaaatgctgggattacaggtgtgagccactgcgcccggccccagtcatttatttctatcagtatggactcttgcatgctttcttgctttggattataatccaatactagtcaactgttcctgaatcacatataaggtactacactatagtggtgcaggcactctgtacatacagcaaaggggcagaattaccatgtgctgcccatggtagtgatggacacaaatcaaaggcttatcattacctgtgcaaagtggttaaaattctggccaaaaagacattttcagtcccaacaatgcaatcagatgcttgaccagcaaaagcagtatactttccaaattataggtatctgcatatccacacatataccttaaaactactgggggcattcaattgccaaatcaaatggacaccttggtctccttgtcttgcttggtcactctgatttatgtgacatttcgtgtattccttcattgagctgttcttgtgcagcttctctgattctcgaggcgctctttcttttcctttgatgattctacccctttctggccacccttcagagctgctgtcaccctaggatccagcctcagttttcttctgaggtctctcatgtcctcatccactcccaaccatgacatccatgactgcttcctccaagtgccaccccctcaggccactgcgcctgggcatctctgcactgtggcttcctggaggctcgagctcatattttatctcacgggcatcttcagcatctaggaaaatgcccggcatgcaatcaccacacaatacatgtttgttgagccaataagttaatccctacttggatgtgcctccaccttgactggcctcaaaccagaacctattacctccccacctggaatccaacgagcacccacctggtcctctgcacgtgggttttgacttcctctctctcctccctacagacaacaaaactcctagcagtgtccatcttatttctcaagcttttcttggaattcctccctttctccatcccttgtgacgctgcttcggtttacatttcatttctcactggcataactaactcctctcttcagtcccttctccaggctctatttcccaccttgctgcagtccccctatgatttaaattcctaacactggctgcttcttagggtagacaaggctcttcatggttggcctcagctgactgcagctgctgcctggtcccagccctgtaactcaatactggaatgatgcaaagtctttatagttccacttctctgagtctcggcctgggctgcccttcctgcctgatgcccttctccctgttctcatttattactcactcctcaaagaccaccccaaagggcacagctttttggtgctcagtgaccttattgaattaccctctgctgtacccatgtctattagtgcacttgccactccacactggaatgattagtcttcatgtctgtctcatctgcctactcatgtgcttctcagttgacagtactgtctgagccttactcctttctgtatctccagtgccttggagacacaggtatttatttaattgcaaaaaaaaaaaaaaaaaaaaaaaaaaagagcattcaccccttcaaaataggagacaagacctgcaaagagcacagtcgatccacgactccaaatggaatggaatacatttaaaatacatctggagtgggcagaaaaagaaaaatgagctcaaaataagttataaaagcttactttaaaaaacaacacttagaggccaaggcaggtggatcacctgaggtcaggagttcgagaccagcatgaccaatatggtgagaccccatctctaccaaaaatacaaaaattagctgggcatgatggtatgtgcctgtagtcccagctacttgggaggctgggacaggagaattgcttgaacctgggaggtggaggttgcagtgagccgagatcacacgactgcactccagcctgggtgacagagcgagactctgtctcagaaaacaaacaaacccccccacccccaaaaaaaccccacaacacctaaatttataataaccacaatctttattattattattattattattattattattattattattatttgagacagtctcgctctgtcgcccaggctggagtgcagtggcgcgatctcggctcactgcaagctccgcctcccgggttcacgccattttcctgcctcagcctcccgagtagctgggactacaggcacccgccaccacgcccggctaatttttttgtatttttagtagagatggggtttcaccgtgttagccaggatggtctcgatctcctgacctcgtgatccgcccgcctcggcctcccaaagtgctgggattacaggcgtgagccaccacgctcggccaataaccacaatctttaaagttcattgtctattaactttaaaaacaaaggaatggttgggcagatttgtctattatggaatcagaccagcagcaggaagggctcaattggaaagtgctgagaatcccacggcttcgatcggttgtatgggtgcttatgaaataaaagttgcaagaatgagtgaacatgtactcctgttagaatccatgtacgactttttagccagagcttctcccagaaaaaatcagacttttcacaaatatattttggttaaaagtatactaacccaaggtaagaattttttttttttcaaaaaaagaaaatctaatgtgtattttgaagagtttatactcaggcatagtggagatcccttctttctgttttcttggtgggaaaggcagaagcagagaggtcaggagaaaggagatggggacggataacagcatggtgggcagtgccaggcatgctgggtgtgtttctgtttgaatgtccaggctgtgacaaagggaagtaaggaatgcatgttggagggacccatttctcatttgccctcatgtctagggcccagaggaccagtcacttaggacagctgaagccaagcaactgttgacatttctggccttgtctcctcttctccctcaccaaaatgatattagctgggacttcctcacctcctatccacaatgcattccctgttccagaaacatctcaggctgctggattaccaaggctggacccaaaccaggctgtgctcagtcactgctcattccgcccatgtggaggaaaaggttcaaggggatacttagagtctcatttgttcactgagggctccataataaagttctgctaaaaatgcatgttgctcctgaactcctgcagcctgcggtttgggacagagtgttattttggagcattcagagttgctgatgctattgtgcccttgtccccgcttggtgtccaaactggagcatttccttgctttcttagagctgccttcacttgaggccacaaaggactcgcactattaatgagcttgtgcaccagaccaactgctgcctcataatcctcaaaacaacctagagaattttttagaggtgaagaggctttagtgattatcaagaccagcagtttatcaactttggtcttgtttttggcaccgcaaccttttcttcaaaagagtcttaagtaaagttgtatcacttatccttcctgtggggatagagttgcaaaaatgcaagtgtcactctgatgtctcttgagtcaactgctcacctgctgtcagtgacagggtgtggggtaatgggatgagccctgcagagcccatgatcataggattaggtcaggaggaagacgaactccaggaaaaagctcccacaatagtagggctcttagctagaaggtggaaattcattctaacagaggtcttgttcacaagcatatttaattagtggcaagagcccaggaaaggactaaattcttgtaatttaggatggtctaaagtatggaaggctttatgtacatttctgaacagccttctcccccttcttggaggcagctgtttcaagtagcgactggtgctcagcctctggagctggcagcggagcccgtgggtgtggcgaggtcagaagagctttgctcaaagccagggtgggtgtggctgcctctgcagccctggcccacacccttcctctgtggactgaggcctcctcctgcccaaatccagagaggactcttaactcttcctcctgcaagactcagtcccaaggcccaggaaagccccagttgctaactctgatttggcccttgttgagctctccatggacatggtggcccctgtggacagggagacaggagagtggattctgctctcccccttcttcagcatcacgttcctcattctcactctctcatcttattaatggcggcaagagttgggaagatgtcacagcatatgggggcaggaggcaggggctatgcttcagacaggtgagtgattgcaaaggacaggctgatgaagggcctggaagaaggttaggaggggagtggggagggagcagtgagcctcatcccatggtgctgcatgctgggctcccacctgcaatgcctggcctccttcctctgccaattcaaatcctacacacttttgagagtccatcccaagtatcactcctctagaagtccaccagacattcctgccttccccgaccttccctcttctctgaaccctatggaggatatgttgtcttggactgagccctggcagatcttccttcaccagacttctggactgagatgatgcattaaactcctctgtatcctccagagagccaggttatcaggcactaacctaatgcagaaggaggtgacttagtcttaagctgtatcagcttcctgaaggctcaagtgccttcctgggacaggtggctctgtagggctctgagactctctgaacaggtacctctatcacagctcctgtcaccttatattgaagtgaccattctcactccagcctcgccctctgcagggcaaactgctgcagtcaccaatccatactcccatatgcattttgttatttccagggcattgcatagaattaacagggcaggaactcaacaaatggacagattcccaacaaaccaaatggaaattaagagactactgtgaagacacagaaaaaagaactggctgatgaataaggagaagtgggattttaaaaagttgtgatgcaaattccattataaactggaatcaaagtcagcattaactaatagtaacattaaaattattgccccaaaatgggtaattttaaatgtgactgtacaagaaaaatcttattttttcttgtgtacgtttaatcagattcttggaaataaactttctttctactcttggatactgcaaaaactggatatgcccaaatctaattttcatatggaaatagttgatatactattaggatttttaatctagtatcaccatttatagaaattttaaatttttttctattaaagaaaaatgcataattttttgagaagtctagatgatttcagccaaagaaaaatgaaagagttgatgagtattaatatagaaatggcctcctggatactgcaatttgtaagtcttagatttatggccggttccttaagagcagggaaatggctattgcatgctcccaggcatgattctttttatccaatgattctaatactttttctatctttcccttattaccaaaaaataatgtcattaaaatcttttttaaggaataaaagtgaaagccagtaggttttggttccttattcatacactcaggtttgtaaataagaaaaacaccccaaacacttcttttatttcccactgcatcattatttccaatgttaagttatcccatctaaaatctagccttttcactgtagaaatccacatttctcattccttaatactttttttttttttgagacagagtctcactctgtcacccagggtgcagtgcagcggcaccatctcggctcactgcaaccgctgcctcccgggttcaagtgatcctcctgcctcagcctcccgagtagctgggattacaggcatgcaccaccacactcggctaatttttgtatttttagtagtggccagctggtctcgaactcttgctctcaggtgatccgcctgcctcggcctcccaaagtactggaattacaagtgtgagccaccgcgtctggcctcattccttaatcctttgttagaactttctagtcaatacattagagataggtgctttagacgttcaaaggattttatgcacattaaggtcaaattctgactgaagggaagacccactgggcactcttgacccactagccagacaacaggtgtaaagacaggggcacatttggtgtgagctatgagcagtaggccacagtggcaggcagaggaagctgggtgccctagacatgagtgagggtgctgggtgtgtgctgaggtcacccaggcgccagggagaagccagggtggctgagggcttttaagaacatggacgcctactaatcagtgtgacattttttgcattgctctccgtaagtcctttccctgtcccaccccacacgctgaatcattctctagaacaatgttctctaacagaaatatgtgagtcgctatgtagttttaaattttctaggagctatgttaaaaaagccaacaaaaacaaaaacaaaaacaaaaacccaacgaatttttttgtttgtttgttttgagacggagtcttgctctgtcactcaggctggagtacagcggtacattcttggctcactgaaacctcagcctcctgggttcaagcgactctcctgactcagcctcctaagtagctgggattacaggcgcgtgccacatcctggctaatttttgtatttttagtagagacagggtttcactatgttcgtcgggctagtctcaaaatcctgacctcgtgatccacccatattggcctcccagagtgctgagattacaggtgtgagccactgtgcctggagttaattttaataatgatttaattattaatttaaataatataattagtaaattttaataatatatttcactcaatccaatatgttgtccaaatactgccatttaaacatatgaaaattacttatgatactgcttacattattttagtgcaaagtgttcacaatcatctgtgtatttcatacttaagcctacctcagctcagactccccatttcaagtgtttgacagccgcgtgtgcctggtagttcctggagtggacagcaccagtggccctggctgggccagtccttcgtatcttgggtgtttctggccccacgctcagttcttcactgggcgagtctcccagggtgggaccctcatatactcaaggacttcactgctgacagcttgattcatttaattcattagcttcccaacaaccaggggatatactgctggctcctacatctatgggcacacgtgtattctttttagtcgggtctcttgaaatagcctggaaatgtgcccttaaactgcaggggaaaaaaatctgggaaatgccttttcctgtaaaagctctgattttacatgcatgcccacagccaccacagtcagggctgccacacaggacagacagggaggggccgcccttccctactttgctgtgttataaatgaacatgttcagttccaacaaccttaataagcagaagatttctcaaatgcacaacacagtactccatttctacttttttattggtaagcgatgggatttcatttgtaatgtataattctgagaactcgtgggcacttacaagcactttaatgctctaagatgattgaggtgatgaagagactgcaataaaatatctctgaaaccaaagatgatcaatcacagggtcgttttccctagccagagagctctctagaatctatgaaaagattacttactggaaaaatgaaaaaaaaaaaaaaaaaaaaaaccaaaagaaaaaaccaaaaaaaaaaaaactaaaaacaaagccccaaccactccaacagggctctttaactgaacattagtcatccctttcccaagaaagacattcactcctcacagcctgacagcctcagacaacagttagctgtccaaacccattcagacaaaattgattatttttttttttcatgaggggtgcagataaaattctcaaatgaattgcctgagaagtcagtttgacataatatcccataaaatctttgctgcttggaagaactataaaaagtttcattaacatagagcttcattccactccaactctttgcaccaacttcatggcacgttagagcatcaaggctcaggtgatttacacacagggagcagaaatcattgcatctcagccaaagagtgtgcaattttaagtcggtttatctaacacttctattactcaaactctgcatttaatatttgcaaaaggtctaatgcagggtgtgcatcggcatcctacacagttatatctgcacccatgtggttttctacgaagagaagagaatcaggtcaaacttattattacacttgtattgctctttcttccttctgtattagacatggtctctggaagcccagagcatggactaacaagctctgccacatcttatagcacagcatgtgctttctaactatgtaataatgaaattcttttttttttttcttctttgagtcaggctcttaatttgttgcccaggctggagtgcagtggctcactgcagcctcaaactcctgggctaaagcgatcctcccgccatagcctagtgtagctaggactacaggcacgcgccaccatgcccagctaattttaaaattttttttgtagagatggagtcttgctatgttgcccagcttggtcaccaactcctggcttcaagtgatcctgctaccttggcgtcccaaagcactgaggttacagatgtgaaccagcatgcctggcctgatgaaattcttgatggctataggcagggacctgccagccttgcagtttcctttgctttcctcttctatcacccatttctttctaagggagtgaggcccttgtcataccctgaacgttttgaaggcatcaagtctcttaatccaacttctcttcccacctcggaatctcagtccagggcaaaaagtccacctagctcttgataagcagagactagaagaagtaggagaaagctggcgagggcgtgttttacaagagttccattcagtttcctgcagctttgagaatcctaaatgccacatggagtcctgccgcccattcagctgggcagcacggcaggtggggcgagatggccttcctgcccaaattctgcccaacttctgcccatcactgtcctgggtgtgggagattgggagggtgtgtatgtatggttgagattgtagatatcttactttgaaaaggactttccaacccaaagagcaactgtgaagagtccagagtttttacagagaaaaaaatgcaagtttcaggactacagagcaaatatagtgaggaagagcaatttgtaaaatactaaactaggtttctggacatacctctactgttaacagtaattctttatttaaataggcaagacattctgctcttgcagaaaggcccttgcgatcagaataagaggaaaatagatcctggtaaggacccaggttctgagaacaccttttagggtctgacatctctgccaggtgtgaagagctgagaatcagtggatctgagttctagccctagttctggtgttaactcctcagccataacttccttgtgctttctttacaatgaggataataaaaccagctttgtcttcttcacaggctattgctgaagacaacatgatataacagaattggaagtgctttcacaaacattgttttatgaacacaaggtaaggtagtgaacaaatacctgactttgtgaatttgcatgctgccaatatatgcacacctgcatcataaggtctcatttatgatgctctatgtttgttttttttcctttaaaaattttctgtgtattcccagctgttcaaaatataattccaagtgtgtatcatctgtagaattgggccactgcagagcactatgttgttcctgaacctaatccaaagtttcaagagctagcccatctctgaacttcccaccagcatgaaaaccctaatctaatctgtgcaacaataatctctagataggcatctctcacacttgcttttggagtactgttttagtagcttacttgtgttttttaaagttcatttctccacccacaggatagctccatatcttccagcaccactaatgagtaagtattagggccaagctggtatctgcagagtgctgactggccaagagtctgcctgtgactcatgccttaggctgtccagcattggggtgctggggggctgtagccataacatttgcaggatttggaaattccacctcaagctccaatcccagggtgttgattctggctaaccatgtttatgcaaagcaatccaagcactttgactcactttgggaatctggcattcttgggcttttgatattgagacagtggaacacttttgtatcagtttaggttctgccaataattgctatccatttaagcacttgattttttacatatttaccagcaatttccaaggctttaatggatagagttagcactcttctgcaaggagaaattgctccacagtgctaatagtcgtggattcacaggcactcagtgagaatattttaggcataagcttagttttattattgtaccttagagaaaccttgtatttttaactaggtggtaactttttactgtattagttaatcaaaagaaacataaatataaccaaaatgttatttttagtttgtactggattctataaaaatatgattacccattctagctttattttgatgttaatatttacatttaaatagaagaaaaacagtaaagggagcacatcaatgtaagaagtgtatggctttagtaaaatatataagaaactttggtaaacagggatttaaaaaactctaatcccttcaccaactcagaatgccagttccttacaaagctgcatacctgagcaaccacacatgtggtttctgtggatgagacatttaaatgatgcaatcattttgggataacagttatataatataaaggtttcacatgagtgtctagctgaaaaaccactgcgttttcctatgaatgcaaagaaacctctgctcaggtgttggaagctgtgcctctccagctgcctgccaccttccaccccttcacctgtggcttccgctggtttctgatgggcaccctttgatcactggggtcagttcaatttcctgggccactgggtcatgggcaggacatgaaaatgtaagaagagggaccatgcggttcacctaaatgacactcatttaataacaacatcaaaatccttgatgtgacaggacctatcgcctggcatactaaaagtggggagagcaattctctcatcttctgctgtagttaatgatatcttcctaaacctgcattaatcatcaagtgaacttctagggataacgtaacttctgggagaatttaaactgagattgaatttgtatctcagacggtagtgcccacagaggtgggcagtggcacaggcttccttcagcttgtgtcccaggtttatgggagaactcttctccctgtccctcaattcacacacaaaagtgcaaaacaggattatgggcatagggcatgggcaatttcatctacagcagtgccgatctctgcctcactctttgaggtcaccacaatgctttccttctgttcagaaccataatggtttctgtgtatcaattgtttgtgggcaactgctgaaagggaatcgagggataaacatgattctaaccaatcgcattctgtggtgtctatgggcttccacctgttaacatgggaaactttctgaatttaggttcatccccatcttgtggaattggatttccaccaagggttcctgctcctcatttagcgtggaagaaagtggattttgcaaataacattcatgatgttttgggcagtatctactctgcctgcaaggtaagaatgagtctgtgggagaacatccagctgctgcaacttgcttcaaagcctcctttttttttttttttgagacgaagtctcgctctgtcgcccaggctggagtgcagtggtgcgatctcagctcaatgcaacctccgcctgccgggttcatgcgattctcctgcctcagcctcccaaatagctgggattataggcgtgtgccaccatgcccggctaatttttgtatttttgatagagacagggtttcaccatcttggccaggctggtcttgaactcctggccttgtgatccacctgccttggcctcctacagtgctgggattacaggcgtgagccaccgtgcctggccaaagcctctgttttattggcttctctttggtgctcaaaattcccacgttcacattaccttgtttatttgaggtaaaggctttcatcaaaatcttcagttaagataaaaatggcaggaagataaaggtggggacttacaaattacattcttaaaagccacccacattttggtttatatctcttattaaatctgcagtacaaattggtttgtcagctctgtttacctgaaagtgtcctgagggaacagaacacatggcagagaagcctgtctggcagaattaaggactaggagctgggaagttccagagcttagaacaacgtccagaagacagacttgcaattgtgctgcagaaggacaaactgttgcctgttggcagaagatggggacagggggaaggaggaagcacagaaggaggaacagaaagggccaaagacaatgtctgtctgttgtgaggtccactggggctggccttggtcacctgcctgacctcctcggagtgagcgtgagacggtcacgtgtactcagggattgaggaggcccaatgctttcacacttcgtaaattcccggggaacactccacactcatactgaaagggacagtgtggccctgactgacagcatgtccaggaccagagtactaggcatgctggactccataggatttagaatgccacagtggccggagcagcaagctggcacactgggttagatggcaaagtgaggatgtgtgggtgtggacgtgggtgtgtgcgcaaggtggcggcaggatagactggtaacactcactcccatgcattttcagcttaggctacaaatgacaaatggcacaccaaagtgaggtgtggtcgtgcagacagaaaaagcaagggcctcctaatgcccaggaagcaaaaaggaaagaacgtctcttcggtacctcatgacttcctgctagaggcctgaagtcactggcacactggaggattctgttagtattctcatcaggtatgctgtttattagacagattaagactaaaagaaaatacacaaaaatagaaagctgcttctttgagaatgatgagtatgttttcaaaaactttaaattttaaatatttatagattcacatgaaggtgtcacaaaatgtacagggaagtcctgaacactcttcacccagcctctgccaaggttagtgtcatgagtaactgtagtaaaatgtcgaaaccaggaaactgacattagaacaatccacagagcttattcagatttcaacagttatgcatggactcatttgtgcatgtgtgtgcacgtagctatatgtaattttatcacacgtgtagctacacgtaacagtctaccacaatcaaagtatttaaccacaccatcaccacaaacgtctttcatgccagccctgtatagccacccctcaaccccaaccctaaccacaggtaaccactgatctgttctccgtctctatagttatgctatttcacaaaggttacatacgtggaatgtgaagtatctatccttttgaaattggctttttttccactcagcataaattccctgagatccatccaagttgtatgtattaaccgttcattccttttattgctgggtagcattcaatggacttttaggtagtttctggttcttggctattgcaaataaagctgctatgagccttcacgtacaagttgctgtgtgaaaatatatttttatttctctgggatatatgcccaagagtgcaaccgctgggtccattttcagctataaaaggaactaccaaattattttctggagtgtctataccattttacattttcaccagcaatatgttagtgagccagttactccacatccttgccagtgtttggtgttatcattattttagacattctggtaggtatgtactggtatctcatctcattgtggttttaatatgcattttcttttcttttttgagacagagtctcactctgtcactcagctggagtgcagtggcgccatcccagctcaccacaacctccgcctcccaggttcaagtgattctcctgcctcagcctcctgagtagctgggattacaggtgtgggccaccacactcagctaatttttgtatttttagtagagacagggtttcaccatgttagccaggctggtctcgaacccctgactcaagtgatctgcctgcctcagcctcctgaagtgctgggattacaggtgtgagccaccatgcctggccttaagttgtatttgctaatggctaatgaagttcagtatcttttcatgtgcttatttgccatctgtatattcacttcaatgaaatgtctgtgtatgtctttcatccattgttgtaactggatggtttctttaatgctaaggtctgggagttctttatatattccacatacaagccctttgttgaatatgtggtttacaaatagtttctcccaggccataatttctcttgacatcctcttagtaggtctttcacagagcaaaaggtttttaatattgatgaagtccaatttaccagtttttccttttatggatcaagctttttgtgtcaagtcagagaactcttcatccatttccaggtcccaaagatattttcttatgttttcatattagtttcctattgctgctataagaaattacacaaatttggtagcttaaaacaccacaagtatatttaccattctgcaggtgagaagtccaaaatcagtatcactgggctaacattaagatgatgcagggctgtgttccttctgaggcctctaggagagaatccatttccctgttttttccagtttctagaggcggcctgcctttctggactcatggcccctttttccatcttcaaagccagcagcatttccaaatctgtcactggctctgcaaagttccttctgccacgtaaggtaacacaatcacaggttttggggatgagcatgtgaatgatacggtggggggcattattctatcacagtttttttctagaagttcgaatgcattttgagttaatttttggatacgatgtgaagtttggattgaagttcattttattttagcctatgaatgtccgattgtttcaacaccattcattgaaaacgttccactccaccaatctccgtcttttaattgatgtatttagaccatttacattaaaagtaattattgacgtgttaggattgaagtctgccattttcttcgtttactgttttattccttttgtttctcatttctctctttttttttttcttttcttgccttcatgtgggtacttgaacatttttcttcttttttctttttgtttagagacagagtctcactctgtcacccaggctggagtgcagtggcatgatcatagctcactacatcctcacacatctggcctcaagcaatgcttttgccttggcctcccagagcactgggattacaggcatgagtcactgcaactggccttgaacatttcttagagttgcattttgatttacttataatgtttctgagtacactgctttgtacacagtttccttaggggttgttctaagtattgccatacacataggtaacttatcacagcttactggtgtcaatgttttaccacttccagtgaggtgtagagaccttacctccatttagatctctgtatcccctccagttttaaaatacaattatcttaagtatttcttccacatgcactgaccagcaccatcagatgtcattataacttctgcatcaccatttctttcatatgatgaaagaagctcatgagataaagaatagtctagtatgtttacttctatttttactcatcctgttctccctgctctgaaaatctcagctttgggcttttaccattttctttctggtggagaagttcctttagctattctttaagggtagatctactagaaacaagttctcttagttttcctgcagccatgctggagacctgcatgccttaaagtcatcagtggctgagcctcctggaagacctagcactacccacgtggcactctgtagacactaacatgtgccacttcagctcctggcaccctgataatggccaacaccaggtggcaaggtgcaggctaggctccccttgcccactcttggtcttgggcccaaggaaattagagttgaggcctattctcaagagagacagatcccttaggaggtcaatcaaggatagcagtgccgtgaaaactatcttcaatagctcagctgggtcagaacagtgttctagaagtttgagtctaaaatatgtgagccctgaaatccttcaacttctagggtgaccttgaggtgtcagagctattcctatatccagtaatactctattggcacaggccccaggcctgaaggtaccacatataacacaccctcattcatgaccaggggtgtaccttacaggaacaagaatataaccattcattagggctcagacctcagatgtcaaaaactcttagcagaaggattggctaagagctccaggaagacatcagagttagagatctcgatctgggaggcatctggacagagatgaaaattgcagctataggaatgcatgagatcaccatgagaagaaggtagaggaaaaaaaccaaaacagacccaaggctgaaccctggtaggaatatcaagaggatatagtaggatggcagcaaagaatagacggttcgaagaaggccttgtcaatggggttccatgctgcaaagaggtcaaggaagttaaagactgggaagatgtcagaggcttggcccaggggcaactaaaccatggaggcccacaatgcacagatgctgggaaccagctgtgagggaggaagggctggtgagaaattaaaggatgggaaaggagagagtgctcagtagtcacaatggttgatggatttgcctgtgtttgtattgtttgggaaaatatggaaatgttataagcctgagtaggaagaacaattaagaaaacaacaagagaggggctgggagaggagggggagagaaagaatgaggtcaacggcaccagaggagaaaaggatcaggcatttcttcctgaaatgggagagaagcaggcatgaatcaagctagaaataagtttaaggtgaaaaaaaaatagaaatttaggatgctgctccaaatgaactacacagctgactagcttatttttcttttgcattaaaaaacctttgggttggctgggcatggtggctcacgtctgcattcccagcactttgggaggccaaggtgggtggatcacctgaggtcacgagtttgagatcagcctggccaacatggtgaaaccctgtctctactaaaaatacaaaaattagcagggcatggtgacgggcacctgtaatgccagttactcaggaggctgaggcaggaggatcacttgaacccaggaggcggaggttgcagtgagccgagatcgtgtcattgtactccagcctgggtgacaagagcaaaactgcgcctcaaaaaaaaaaaaaaaaaaaaaaaaaacacgccctttgggttgctgaaattaatgtgatcctgttggggcaatggtggtttccaaatctgaccaaacatcaaaatcgattaagaaactttgcaaaaatacagcttcccaggccccaacccagccacacttaagcagaatccctggtagagggggcccaggaagcagcattttaaagtttcttcagtgatttagagggttaaaccaggtttgggacctctcgagttacgatgttcaaccatgtatgtatattagaatcataaggcaggtattggtagacccagactctccagattacaggtattaatatttttaaaaagctccacaagtgctctgatgtacaccctggttataaaccatagtcaggggactggtttggaaaaataaactatctggataggatacttgactttaccataccgattggtcctctgtcattcagattgcctgacaattaactttacacttttctcctattaaaacagcacctgcttctatccgggctgtcactggtgggctgatggttccctgtggcttctcagcggatttctccaggcagccaggcttgtgggcttaccatctctggccctctggaaagagcctggctttggaagtttttgtagtatctttaatgtaaagtatacaaaatttcattgttctttatctgaactaaccacacaatgcaccttataaaagaaacagtaagacacagaatggaggaaggactatagaaaaggcaataatagttcatatttcactgattagaaaaaaatattatcaggcagacccataattaatttggtgagaaaattccttgcaccattaggccgattttttgttttaaagcagcagtaacatcaccaaacaactacagaaatgagagtctcgcatatagctgtttggctttgagggaagctgtaagcccagccctctaaatgcctctcaaagaaatacaaattcttcttttatctaaaatgatggtgtgatccaattcctgctccagcagccccaacatatcatctgttggactctttaaagtttacggcacagacagaaactgtcagttcctctcctcttttataggacattcacatttgcatattcagcagacagcacaagcctcaaaggccatattccccagaatgtaatcatcctacttttgaaataccgaagatataatagtacaatgaaaatattcttaccccgatgaaggctggctccagttgtggcttagcaagtcaaaaactagtaaacttgcctgtaacaacatcctaaaattccaaaggttattcttccccatccacagttaaaaagccatctcctacagaacagtgtcatatctgtgacatgtccaagattaaaggaagagccttcttgcttttagtaatttgtctggttagagattaaagaaaaaaaaatcaatcttgaagctgtcagttaatatttttaaattaaaaaagccatcttcatgcttcatgggagaaatgtgtgatttttaaacagaggtaaattcctcttcgtatcaagtatcagataatttttttgcatttcagcacgaggcaaacaaacaaaaggttatccacgaagtttcaaacgcgtcttagtaacataaactgaagttaggtagccttctttgatattgaattaccaaagtatctcgctgaaaaaaaaatcccccttgcaattaataaacaagttgtggtattttaacaaagttccaaagctaagaatcttcacattccaaatctttccattcctggaagagctttggtatttagatgttaataggatgcctgccttttttttttttttctttttttggccaatcttcaggctaaagagtctgtgaagcagactttttccatcctatgacctcagttttaggatttctttcttgcaaaatttagttattttggttggcagattgccagaattcattcttattttctttctccttctggtactttctccctttacccccttctgtttctctcccttcttcacctatcttgtattattctctgaattgaattaagaatttaaagtccggttggtggactggactacagtctctatgatgtttggtagggttgttagaattagcaaatgaaaatacaggatgcctagttaaatttgaatttcaggtaaacaacaaacaaatttttagcataagtatgtcccaaatattgcatgagacacatttacactacaaattattttcaagtattgcatgggacatacatattgtaaaaaattactgtttatctgaaattcaaatttaactgggcgtcttatattttatctggcaacactactttggaggttcaatggaagggattttaaaaaaaacaaaggcatccatttacaactcctggaagaagagaaatttccactcctatcctcttgaacgctttttgtctagatgtaatgttcttgattacctcattttagtttatttttgacccagtaagttgtactaaaagctccacagagcatgtcacatccttatattaaagaagtccatcccaggtttcaggtctcactcggtgtcaggccaggccagagcttgcaaaattggtcccccaggcaacatgggaccttggcgcagtaacagaacaatgcaaatgctccagttttaattttttccttcaaaatctgaacaccaaatttagtacttttgaaggcactgatatagttttctctcctcagtgctcactttggggcaatttagcatgattagtaatagtgattattagaaaacccaatagaattcacatgaatgttgaaatgtaataaaatgatcactttttgggcattttgaaagggcagataaaaatattgatatgcttctgacatttaaagataagatgaagatcttaattacattaattattaattcaggtgtatttctgaacatctaaagaaacccaggagggcgacacataattccaaaatgccgttctcttatttagagacacattgatattcagtattttggaactattttgaagtttaatagctgaaatggaggctgtactttaaattcttaaactggactttaaattcttaattcaattcaaagaataatacaagataggtgaagaaggaagagaaacagaagggggtaaagggagaaagtaccagaaggagaaacaaaataatcacacagaggtgtgagaaaaagtatgggctctaggcgggtgcagagtcaggtgctctagcacctgtttgtgaacccagctactcaggaggctgagcagggaggatcacttaagcccaggagttcaaggccagcccaggcaaatagggagatctcttttttgaaaaaagtatgagttcaggagtcaaactgggttcaaaccctagctctgtcacaaactagctgtgtgaggctggtccagtttcctaacctttctgtgcacatattccttatctgaaaatggggataaccaccccagagagccgtaagagtatgagacaagcactcagaacagtgccaagaacacagtaaatgctcagtaagttttaggggtgaagatcacgtgatctagcccaaactatcaatagaaagataaaactcaccaagtcagagaatgtctccactttgataactgggtcatgagagaaaagatttttctcttgcagtcaaatgggtattttaaaaaaattataaatagcaatattttatgtatttactcattaaaaagaaacttctctttattttcagaggatacaacttccaaggttgtgtgaaattagcatgatactactgttccaagaagtgaagctatatggttatcagttctatccaactactggttattcttgtttcaccctacttattattctatttactcccagaaactccacaagcaaataaatgacactctttctcatccctacccccaaagccaattaatcgaacttgatcgtctagctttactgttaagcagattttcaaatgaaatagtcccaaatcactgggtttccagccatctggaaaccactttgaacttcatttgtttatccatgtttttaatgcagctcaggtgtctgtagtctgaggcagtgaggaaaacaagtgcttctgagtcaaacacctctggggtaaaatcctggcttggccatgctgcctacctgggtgagctctctctgccttggtttcttatctatacaatgggatattctaatgttgtctcctttctgagttgctataaagattcgaagagctgattcatgtatagggtgatcctatgtttcagcttacacttattgtccctgcagaattgttacactattacccttatttttataaagtatttaatacagagcctggcacacagtattcagtatttgttttttgtttctttttttgagacagagtctctattgtccaggctggagtgcagtgttgcgatcttgggtcattgcaacctctgcttccccagttcaagggattatcatgcctcagcttcttcccaagtagctgggattacaggcgtgcgctaccatgcccgactaatttttgtatttttagtagagatggggtttcaccatgttggtaaagttggtctcgaactcctgacctcaagtgatcagccttccaaagtgttggtattacaggtgtgaggcactgtgcctggccagtattcagtatttgttacctcttaatcatgatataccaacacctgcagtattctaactaaatccttgaaatcccatggaatccttatttttaaagcaagaatagccttttttgacacaaaaaggtgagtgcctgcctgaatgtgaaagtttggtcacctgcccattatctccacattccctgtccctttggatatttcagtcatttaagaagttaaaagtgggggtggaattctctgcggtagaaccttggaggcagaggctaacatattttacatgctttggcaggatcatgtgagcacagctttactaaaatacactctgccaacagcagaaggccctctgaggtgagcaggtgggacgaggctgggaagctgtcacttgacttctgccagctactcggaatgtcagatgaatcccagactgcagcccctgcggtttccaaggcccccatcactgcacagaaataccaggctcactcagcgacaggagccaggcttcctcctgtcgctcctccccagcctcctcacagcctcaagatgcaattctcttgacagtagggagggagggcagatattaagggcttttagggaaataccagccctttcttcagaaatggggtttcttccttaacatctctcccgtttcatgtgccctctgtgccaggccgcgtgtggtgtctccaagaggatctggagcaggcggacccagtcggaatcttggctctgcggctcatgactgcaaacccctccaggagccaactcacttctctgagacctcgtttttctcttctgtaatatgagatgtaataatgtaataatacatctcattggattgttatgaggattaaatgagacaacatgtccagtagactgcctggtacaaaataggcatctaaggcatgccaagtatctttatggtcccaggctgcctgagaaggggtcagcattagaggcatgcgggtgcaaagagaacctgcgatctaggggtggaaggtgggcgggcttcagtgtgcaaatatgcaagcttggcatttaggaggttttacatctcaactagaatccaaggaagagggagaacaaatccagctgatggtatttctgaaagaagacgcacagcgaatgtatgtgttccagccatcctttgtagtatcctgcattccttcatttattcatactgtacttgcttattgaataagtactatgttctcaatgctagaaacacttcaacacaagagcatgaagattcattaaagataacattgggaggaagcacaggcagtctgttaatgtcaggcaatatttattgattgcttgctgcagtcaataaatatggtaataccagccacaatctcccacagcccgggcgactcctcagaaaaacgttggcacctgttaaagccacagtgagtatggagtagctgaagtttcttaactcatgtctctgtggactgaagagctcattgcaaaagggccaaactcgcttccagagactgttccccaccttaatcataactgaagtaaaccattgcttatgtggtctaactggagtcactgaaaacttcccttctcccatgacatatattccaaatgcctacttgttgaacctatgaatgggtcctaaaatattctgggttgtcagttctttgggttaaaactttcctaggtcctactggaatgctcttgggttctccaaggggaatacttcagggagccatatattctagtcgcctcttggcagcgtgcaccagaggaaaggcctgtgtaggaagacactcactggctgagctctttcagcctcagtttcctcatctgtaaattgaggaaagacgagcccagctttcagagctactgggaagactgaagagatcatttacacaaagtgactaggccagggctagaaacatggcaggggcccagtgcatgccatttccttctccttcctcactcctttggcacaaagcatctcagaagttggtcagtaacctctactgtgttttgtgaacaggggctgacaaaagtgaacatgtgcaattgtgacctgcatttaaaaagatgaggaatagaaaatgtcagagtaatggtaggtgatctttgcgacacttttgcttcagtacacacattcacaaaggatacggtataaaatgtacttctgactgtgtaggttatagtcataaagttttgaggtgggtatatacccccaaaaattaagaacaggggctcaaagagataatgtaaacccacgttcctggcagccttattcacaatggccaaaaggtggagccaacccaagtgtccattgacggataaatggataaacaaaatgtggtctgtacatataatggaatattactcagccttaaaaaggaagaaaattctgacacatgctgcaacatggatgaaccctgtggacattacactttggaaaataagccagacacgcaaggacaaatactgtatgattccacttatatgaggtccccagagtagtcaaatgtaaagagacagcaatggtgattaccagaaatggggaggagcagggaacagggagttattgtttaatgggcacagagtttcagtttgggaagataaaaagagttctaaggagagggtggtgacggccgctcaacatgtaaatgtattaatccttgatgccactgaactgcacacttgaaaatggttaagatggtacattttatgttatgtgtattctgccagagttaatttttttttttttttttttgagacagagtctcgctctgtcgctaggctgcagtgcagtggcacaatctcggctcactgcaacctctgactccctggttcaagcgattctcctgcctcagcctcccgagtagctgggattacaggcacgtgccaccacgctcagctaatttttgtatttttagtagagatggggtttcaccctgttggccaggttggtctcaatctcctgacctcatgatccgcccgcctcagcctcccaaagtgctaggattacagacaattaaaattttaaaaaattaaattaaaaaatatttgaggaaccttgacctagataaccccccgaggaaaggtacatttggaaggagcctgggtgtagaagacaaagggtgggccctgggcaattaaacaggagacaggggaatatagactccctattttttttttttctagagagagtcttgttctgttgctctggctagagtggcaatggtgtgacctcagctcactgcagcctctacctcccaggttcaagcaattctcctgcctcagcctcctgagtagctgggattacaggcgcccgctaccatgcccggctaattttcttgtatttttagtagagatggggtttcaccatgttggcgaggctggtcttgaactcctgacctcaggtgatctgcctgcctcagcctcccaaagtgctgggattacaggggtgagccaccatgcccagccagactccctaattttataaactctcttttacgacctctgggaacccggaccttccaatgtcgtgccagaacacagaaaatggggttcgcagtctttttctatgatggtatcatttccaacagacattcctgtgttttagtgttttattctgagagcaaaacaaatacaacagcaatgcctaatcgccctctcaggtgaaactgacctttcctcctcacctcttctccttcagtaactctccccagcccaaagctgactccttggtaggcaaaggctggtcagtcttccttccttattcactgaataagccatgcccctttgcaggcctccagtctaatttgtgattctaactaatgaggtggggtctgaggaacttgaagaggccctttctattttattttttattcttggtttccaatagttggagaaacaggatctggccaactttctctagacaaaggctgtatgctaggtttttcattttcttagctgaaatgattgtggcaaatcacttaaacagatacaaaaaggaggtctctgtggacggacacctcatagactaaaagatcagccacagttcatcattttagacatatattgctagagccaaaataagtatcaggaaggtttcaagtttctctggaaaagaaaatcttttggtaacaattctcaaatcgaccttgatctctcaacttccagacactactctatgatcagtttgtgtaaccttattgttaaatgcacttgcataaatgatagatttctttatatgtttagcacacaattgttcctctgtattttttccctccatatttaatgttttctaagatagtgctacaatgagctaattaaaaaattttaatgaatattatatcaatgcagggacactgacatgaacatgttgcactttgcatgtttctatatgactccaagttgcacattatgtacctgaaagagcctctgggcatcatccagacctgctccaccaatctgtggtgctcacgtcttccaagacattttgaaatagaagtcagtggtggaggtgaattcttcagcctcctgcaggacctgcatccttcactctggggagaggtaaagccacacgcttcttgctgatggtcctactcttggagaaggtcctgtccttggagaagagctcactctggctggcatctctggagtagaccactcagtctttctcctcctcagccctagcttcatgagatcttttaaaactttctattaatttttgtttttaccacccttaacatcttcttagttttccacgttttagttttaaaaaagaagagaaaaattctagtaaagctctgatcagtatcaactgcagacacgaggctgttttatagcttttataagttatgaatattgttataacaggaggaacaatgatttatttagtgcctattacgaaacaggcactttccatatatgaattccaactaatatattaatttttgaagaaggaacatttcatgggtctgagcttataacagttataagacttataatgcggtctgagcttataatagtttccaagtcttttactgtacacctggctggatcattttccttctgcctcattttgtttattttttcctccgaggagttcaacactctctgtttatttctgatttatgtaggtcatttcaaatctttttttttttttttgagatggagtctcactgtgtcacccaggctggagtgcagtggtgtgatttcagctcactgcaagctccgcctcccaggttcacgccgttcttctgcctcagcctcccgagtagctgggactacaggtacatgccaccatgcccggctaatttttttgtatttttagtagagacagggtttcaccgtgttagccaggatggtctcgatctcctgacctcgtgatccgcctgcctcggcctcccaaagtgctgggattacaggtgtgagccactgcgctcagcctcaaatcttcatttattctttaaggctacagttactttgtacgattgagggttatctacaaatgtagaaggatatgctcttgggatctgtctacaagcctgtgtaattgacccttgacttgagagtggattttcagtggtggtaaatgtggattgagcaagcacagtgatcctgccaaattgtggccttcatggaatcttggaaatcttcatctgctcattattcctagaatttttctagtataggcaacagtctagcaggatgttgacctactgcttttcaggcattatttcaattacttgatcttcttgagatggttattgtctctagagaaacaatataagagctctgggatagtagcagaatgggacagtggttaagagcttggcttctaggatctgaatcttgggttcaaatcttggctttgccactttaagttaataaacacagggacattagttcgcctctttctactggtaaaacaggagtattactggattgctgtaagggttagagaggataacacatgtcaagtgccaagagttgtaccttgttaaggtaagtgttcaaaacaggttaattattatcaggtaaaaaagctgtcacataactatatatatatatatataggctgggtgtggtggctcatgtctgtaatcccagcactttgggaggccaaggtgggcggatcactagatcaggagttcgagaccagcctggccaacatggtgaaaccccatctctactaaaaatacaaaaattatctgggcgttgtggtgcttccctgtaatcgcagctactttgggggggctgaggcaggagaatcgtttgaacccaggaggcagaggctgcagtgagctgagatcacaccactgcactccagcctgggtgacagagtgagactccgtctcaaaaaaaaaatatatatatatatatcccatcatggcaactcccaatcaatccccagcctctcacagcaacccctgttgcctttttcttgaacttcacataaagcaaattttacagtatacactcttatgtgtctggcttctttcatttaacataagcttctgtgattgatccatgctatagcgtgagcagtttgttgctatttgattagaagtattccattgtatgaatataccacaactgtttattcacgagttgatggacattggggttcagttttgcacagttatgaatcaagtagctacgaatattcttgcacgaatctttttaatgaatatgtttttcatttttcttgtactaatgcctacaaatgcaatggctaggtcatgcaataaatgtgtgttcatttataagaaacaaacagttttcaaaaattgttaggccattttacactcctactagcaacgcatgagagtttaaattgctccatacacttaccatgatttagtggtattggtatttttaatttgagccattctagtgggtgtatactggtatctcattgtggctttaatttgtatttccctaaaataaacgttattagtgaaaagcaccttttcatctgcttattggccaatttgtgtatcttcttttgtctgttcaaagcttttgtccatttaagaaatttataattttgtcattgaattgtcagaatatcttatatattctagacacaaattatttgtcagatacacgtattgcgaatatattctcccggttcgcagcttgacttttcattttgatgagcagttatctttaaattttgatgaagtccaatccattagaactttctttcatgttgtgtggttttgtgacctctgtaagacatctctgtctgttcctagttgtaaagatactgtcttctgttttcctctagaaactttgttgttttagcgtttatattgagatctgtgctccctctcaattgtgtgtggtatgagattcatttttcccctgagaagttgctctggcatcatttgttgaaaagacccggctttccccactggactgctttggtgtctctgaggaaaatcaaatgaccatatccatatggatccacttctagactattttttctattgatttatttgtctgcccttatatcagtgccacactgtcttaaattactttagttttacagtaagtcttgaagtcaggtactgtaaggcctctaactctgttgttcttaaagactgttttggctacctcttttggttttctataaagattttagaatctgtaaaaccattttctataaaaatgtcctgcaggtcttttgatcaagattgtgttgaatctatagatcaagatgagaaaaatcgagatgtcaacactatcaagttttccaattcatgaacgtctctccatttagttaggttttaaatttctctcaaagatgttttgtaattttcattatacaagtcttacacttctttggctacatttactcagtttttatgttttttatgtcagtttaaatggaattgctttttaaatctcattttccaattgtttattgttgataaatggaaacacaatagatttttggttattgacctttataagtttacttactgattctagtacttgtttagtagtagtccttagattcttaggactttgtccataaacagtaattattttcaatctttatgtctactacttcctttccttgccttattgcctgaccaaaacctccaggacaatgttgaatagaggtgataagggtagatatcattgctgtattcctgatcttaggaagaagtgcttggaaattcactattgaatatgaatttagcagtaggtttttcaatttttttttttttttcagaaggagtctcactctgttggccaggctggactgcagtggcacgatctcagcccactgcaagctctgcctcccgggttcatgccattctcctgcctcagcctcccgagtagctgggactacaggtgcccgccaccatgcccggctaattttttgtatttttagtagagacgggttttcaccgtgttaagccaggatggtcttgatctcctgacctcatgatccacccgccttggcctcccaaagtgctgggattataggtgtgagccaacgcgcccggccttttttttttttttttttttcctgatggccatcattagaataaataagtttccttctagtcctagttggctgggagtgttttttttttctttttaaatcatgaatggatgctccattttgccagaagctttttctgcatctatttagatgaccatgtggtttttcttccttattctattcatatagtggaatacattaagtgattttctaatggtaaaccaaccatgcactcctgtgataaatcctgcttagtcatagtgaattacattattttcatgcgtcactgaatcagatatgctaatatgttgtgaataatttttgcatcagtgtttgtgcaaacattgatgggatattgtatgatatttttcttttcttatcaagtttatgtcaggttttggtatcagggttgtactgaccttatacaataaattgggtagttttccttctccctttattttctgaaagtttgtataagagtgttagttcatttgttggtgttccattgatataaatatatcttaaagttttcatagaatttaccagtgaccttttgagtattataaaatgtccttttttgcctcttatactctttgtcttgaagtctatgtggtagcattaatatggtcacgaatcagctttcttatgcttattatttacatagtttatcttttctgtcttctggcttcaacctacttgtgttttatttaaagtacgtattggccgggcacggtggctcacgccttaatcccagcactttgtgaggccgaggagggtggatcacaaggtcaggagatggagaccacggtgaaaccccatctctactaaaaatacaaaaaattagccgggcatggtggcgggcgcctgtagtcccagctactcaggaggctgaggcaggagaatggcgtgaacccgggaggcggagcttgcagtgagctgagatcgcgccaatgcactccagcctgggtgacagagcgagactccgtatcaaaaataaataaataaacaaacaaacaaataaataaagtacgtatcatgtagaccgcaggcagtcttaattttgtagctggtctgacaatcttttccttttaattggagttttttcagtccatgctatagtttggatatggtttgtctgtctccatcaaatctcatgttggaatttgatccccagtgtggtggtattgggagctggggcccagagggtggtgtctgggtcatgggcatggatgcctcataaacagattaatgtcctccctgaaggtgagtgagttctcactcttgagataataaattagctctagaggagatgaaagagttcctggaagagtaggttgttataaagccagaccatctcttaggtttccctcttcgcacctgcccatttcccctttgcccttctctatcatgttttgatgcagcatagaagtcctcaccagaagccaagcagatgctgatgccctgcttcccatacagcctgcagaaccgcgagctaaggatgcctcttttcttcataaaccacccaggatcaggtattctgtaatagcaacactaaatggactatgacagtccatttgtatttaatgcagttactaatatgactgggttcaggtttactatttttcaatttgttttctattgataccttctgtttttcatttctggtctttctttcccgccatcttttatgttaatctattttttagtattttattttaattcctacaatgacttcttagctctgctgcttttggatatttgtttttagtggtttctctgggtattataccacacatctttatcttatccccagtctatttagatttaatgtcatatcacttcacataaaatgtaaaaactttgcagttgtgtagaattccacttgccttcccttattgtttgtgctattttgttatatattttacatctgcatacatcacaaatcccacaaaataatattttgattcttacattaattaaaaaaagatttacccacatatttattatttcctataaatattttcttcttgtaggtttgagcttccatctcatattattaccctgtggcctgacaaattttctttgtcaatttattgtagtgtaggcctactggaaatgaattctctcatattttgtacatcccaacatgtctttattttactgtcaattctgaaggatatttttgattatttagaattctgggttgggtgtggtggctcatgcctgtaaccccagcactttcggaggccaaggtgggcggatcatgagatcaggagattgagatcatcctggccaacatggtgaaatcctgtctctactaaaaatacaaaaattagctgggcatggtggcacgcacctgtagtcccagctactcaggaagctgaggcaggacaatcgcttgaacctgggaggcagaggttgcagtgagctgagatagcaccactacactccagcctggggacagagtgagactctgtctcaaaaaaaaaaagaaaaaaaaaaagaattctggcttgacagttcttcctttttctcttttgtctttcagcaccttaaagatgcctttgcactgtattacatatttgtgatgagaattcttcagttaattgtatctgtgttcccctgtgtataagatattatttttctctggctgtcttaaagattttctttttctgtttagtttcccataatgttccacggtgtagttttatttgtgtttatcttgcttgcagcttgctgagcttcttgaatctataaattaatgttttcatccaatttgggaagttttcagctattattccttcagatattttttcaggtctattttgtctctcctctcctcctggcatcacaatgcatgtatatcagactacttgatattatcctacaattcactgaggctctgttgattgttttttaatctttattctgtttttcacattgaacaattcttactgatatgagtttaagtttactgattattttttcatttctatgcttcatttatttcaaatgttacatttttcagttccagagttttcatttggttattcttattggtttccattatcctgctgagattctccttcttttcagtcatgatgactatgttttcctttacatccttggacatattatagtagttgctttataattcttgtctgaaaattctaatatctaggtcacctcaagatctattacagtggctattttttctcttgattatgggtcacattttcccactcatatgtcttttaagttttggttagataatgaacactgtaaattttgttttagagattccaaactctcttcttttaaacaatgttgattgttttttgttctatcaggcaataaaatctctagctgattagcttgagcttttgggtacttagtgttatactttgttaggaaggatctgtttcggttttgcccttaatgttacggtgactcctttacactgaaagcacacaccccttctggggtttcaatagaaaatctgaggcatttaccaagcccctctaacttgggtgggattcagattctgaactttgtaggcagtagctgtaggcagtaggcagcagctgaaaagagtctctgctcagcatttttggctttctagttattgttttccactacgctcattggcatattccccacacatatgcagtttaggggttattcaaggattgatggaaatttatatacagaatggagggctctcttctttatggctcttttctttctgtgacttactcaattcccagccactctggcagccctaaactctatcccctgacacctcaagccattacagctgtggctttctccttgagttctaattgttctttgtggactggggcatgccttcatgggagaagctatataaacatagttctcactctttcaaggatcaaatgaccctctttcaaggatcaaatttcctacattctctgccttcttttagttagactatgaatagtttttttaacaaaagtattttgtccagagtttgtaacagctatctgcaggagagttagtctaagataggttcttccatcattaatataactggaagtctgtcacagacattttaatttgtgcttttgtgtgtgcacgcatgttaagattaaatcgctcctttcattgccctgaatgctcataggatcactaaataatatatattgaaggattactcgggtgttgtccagactgtgtcatactgccaagcattgaccatctgaaaccaatcatgatcgatctcccgtttttaaaggaggccatgaagaaagatgcttccttaggaaataagctcttctgtttggagactcccaaccttgtattacaatttaagtccatataatggctttaatgactcagggtcatagagttatacagacagagggatgtataggccttactgaagccacactggttccaccacaccatgaatatgagagaggcatctttcccagtgccccatgcttgctagccctgttttcttcgctctgctccactcctgcagctgccatggagcctattatgtttcatgttttacttaggctgtctccccttttcccattttcagaaatctgtgtacccctggttctgtttacctgacttctgaatcactctgattactctgccccttaatgttacaggccaaactacttcttcccaaaatttatatgttgaaatcctaacttccagtgcctcagaatgtgactttatttagtgacagggtctttacagaggtaatcaagttaaaatgacgtcattagggtgggccctaatccaatatgactgctgactatataaacagacacagagatagacatgcacagagagacgatgacgtgaggacacgttgggaggagacggtcacctacaagcgaaggagagaggccggggataactcctctctttacatctcccagaagcaaccaaccctgctgacaccctgactgggacttccagcctccagaaccatgagaaaataaatttctgttactttcgccacctacttgctggtactttgctctggcagccctaccagatcagtatgcttgccacttaacaaatcctctgctcccaattttcctacttgattgtgactcatggctttagtttgtctcttgagacccacaccccctcttggtatggaaaatgggcaaaaatcagaaggtttatgctctaactcctcacttcagtggaatgacctttctttttttttttttttttttgagacacagtctcatgctgttgcccaggctggagtgcagtggtgcaatcttggctcactgcaaccttcgcctcctaggttcaagcaattctcctgcctcagcctccccagtagctgggattacaggcgcatgccaccacactcagctaatttttgtgtttttagtagaggtggggtttcgccatgttggccaggctggtttcaaacttctgacttcaggtgatccacccacctgggcctcccaaagtgctgggattacaagtgtgagacaccgcacctggcctggagtgacctttctgatcctcagattccttatccataatatggggatattgtttctatcctacctacctaaaaaagctcagatagatgctgcacataagaatgtaaaatactacacaaatcaaaggcatcctgaatctcactctttatccgtaatgtactgtacctcatacccaattataacagaacctctgttagaggtctcttgagcggtttcaagttcagaattctccattcataggagagatgcttgcaacctgttatttctagtttaagaggcaggtgcctaagaaaccgttttgctcaaagaggcaggaatatggggtgatgcttcaagctcccattgtttttatatttccagagggtttaaaagtaattcctcagacaacttacctattttttttcttttttttttctgagatagaatctccctctgtcacccaggctggagtgcagtggtgcgatctctgctcactgcaacctccgcctcccgggttcaagtgattctcctgactcagccacctgagtagctgagattacaggcacgcgccaccatgcccagctaatttttttttgtatttttggtagagatggggtttcagcatgatggtcaggctagtttcgaactcctgacctcgtgatccgccccccttggcctcccaaagtgctgggattacaggtgtgagccaccgtgcctggccaacttacctattttcatagatgttataagaaataaggtacagagtaaagcaaaccagtgcttttaggcaataaactttttatttttttatttattatttttgagacagtcttactttgtcacccaggctggagcacagtggcatgatcctgggtttaagctattcttgtgcctcagcctcccgtgtagctgggattacaggtgtctgccaccacacccagctaatttttgtatttttagtagagacgaggttttgccattttggccaggctggtctcaaattcctggtctcaagtgatctgcctgcctcggcctcccaaagtgttgggattacaagcgtgagccactgagcctggctgggaacggacattttagaaatacgtaagggaaggagaactttagaagcacatccaactgccttaaccaaatgggtgcctactgaatgtgatttttaactatgtaaaattaaatgtaggatgctagtcactttccaacatactttgtatattctttgtcagtctttaaaataatttcattattgagaatttgaaaaaattgtttctacaattaaaacttttataaaataatttattaaaaaatacaacttcccccaaatagcttacattctggttgcatgaatttttatgcagtttctactgttactcaaaagaactgaattttcaatgattctacccttttcagttctctagaatgcctccagatggcattaaaagcctttcccattatattttacaacacaaaaaaattaaaaattagtaacattttaaccatttaagaccagtcacattcattataacatctgaaagcaggacaatggaactatttaaacttttagggaagtatcttaagaaagacaaacatataatcatatctcttatgaaatacacagctctcctattcaagccaaaggatctttctagacaaagaaacagattttggacaaaataagacactcagtattttaccacaaactgatttccaatcaacagcacttaaaaaatgctgttttttaaaatcctgatccccatacagataaattcacaaagcctatcttataataagaaaacacatgccactgctcataagtgataaaaataaagatttttaaggagcaaacctgttattgactcttatggaactaaaataaagtcacttgttagctcatgaattttttaatttaaatgttggtatatcaatttggcatcaaattaatcagtaaaaatatatttggattccttgaatattgagaagaaacagacaaaacatagagtgaggagcacatgttttataagggccttttcttatgtttttaaaactgcttttgttaattcaaaaaagaaactcttgagattccagagatatcgataattgtgcttttcacataattccaaggtgaggttgcagatggcaagcttctgaaatgaccttgttactgcacagctgtgtgggacagcatacctcccagtttaagtgtgaaaagttctgcaattcttaagatgatgctgaaagtctccaaccaaatccccccagcatacatgctcaaatctcattacatttctacttcataaagagaagcatttgcatttttcaagattcctcttactctgctaaagcataaaaaatgcatctgcacccaaagcatttagaaagacattatcatgagaaaagagaaccatgggcttccttccatcatcattattactattacaagatacttgcactatctcattttatgaggcatatttaagaacaggcatctctgatagaaaatgaaagaaacttacgatgtattcgatgtgccactgtctggactctctggctctgcatcacctttctcttaaaaaggaagcagaaaaaaataccgacatatgagtcttacagtctttaagatttaagagagattaaatatatttccatgctcctattaacaatctttcaaaatgtgtagcaggaggcttttaaaacatcttttattgtctgagaaccggatttgcaaaataatttcttttctgcaatgcaactgcccaggcacaaatctgtgagtaggtactgaggagctatttgcaaacaaccagaggcttggagtggagactttgccagaagatgaatatcttacagatggaacctgtttccttccacttcactttacagaaaatttcaggaaataaatccattggcattctatatccaaggcactttgaactttgattgcttctgctaacataagccaaaccaggtcaggctgaatcagaacttggaggaaagaattttttttttttttttttttgaggcagagtctcactctgtcacccaggctggagtgcagtggcacaatctcggctcactgcaacctccacctcccgggttcaagcaattctccagtctcagcctcccgagtagctgggactacaggtgcctgccaccacacctggctgatttttatattttttgtagagacagggtttcaccatgttggccaggctggtctcgaactcctgacctcaagtgatctgcccgcctcggcctctcaaagtgttggaattacaggcgtgaaccaccacgtccggccaggaggagagaatttttactgaacactgaggttgcactgtaggtcccaagatccccctattttataccccatagagagccctggtggcaggttttggggcccctagcttaaagcagaatgagatgtaaaccagaaatcctttctgaccatctgaaaggctagttaaggaaatgcttctgtgggctgtgatcactgaggaattaacgagttgtacgtagttgggggagcttggaaccagttcacttcttgtagtttacagtaggcttaatgtaattcctaatccttaatcaattggtggtttgaaccatgcatcctcattctgtaaggagtttctttgtatttccttgaggcttggagatggaagaagtcactgataactgagagcgtgggctcgtgtgtttcctgatggttgtgcagagccaatacaccccagagaaggctgtgagttgcaagaaataggactgtggtagtaacttggtttgctatgctctttcaagtcaggcctggagatctctagaatcccttggtctactgctcacgtccttgggcccacacattgtaccataccccttttgtcagctgtcaacattagcttgtcgtcacctagtcccaggaatgactccctaaattacataatgaacatatcccaaaggtattgcccaaactgaactcaaaagcaaactttatatgtccttctctttttcttataggaataaacagttgtgagaaaaagaagacacagtttctacagttcgtacatctatctcagacatttatccagtgccagaacagctatgagggactttggctaaaagctggtcagatgagggggaaaaacaaaaaagccacaaaatctattttaactgccttgataacaaacattgattaggcagggcctcaatacatataaaaccatgttggaataaaggctaaagtagcaaattaataaatttgctttaaagctcattcttgtatattttcttttgtcttccaggcaaggtctgtggtgcactcatttaggaggcaaataaggcctgttcaactggtttcagtgctggaaaataatttagtactttgcagaaacattttttccatggactaaccacaatccctcttgtaatcctaaaatagagagttataacacctgcattatataagacaaaactaaatggaagtatattttttttctcaaatatatggatcctttcccccaacctgctttaatttggtgaaactggttactttccccagtctctagcctgcagtagttaccacattccatcttaatgaagaatgtaaaacagcaggcttggaagcagcaggcaatggtaaaattcccaaacaatttatgtcagaaaacaggaaattgaaaataaaaacgaaggcattgtttggatgtttgaagaaatatgttttgccttgaccaatcatgctgcccaagtcttcagcatggggacagatgcgcagctgattatctttgctcttagcagcacttatgttgtggcaacagggcaaacagaataggttctggcaaataggaaggatatagtggggccaaacaggacatggtgaacagtctgagagggagtgttctcagcaaattcagtgctgataatgaatttgcctttctggggggaaaagtaagctggtcaggaacgagatgggattaaaactatttttgtccttcagaaagaataaaacacaaagcttcccccacatcttgaaattttaggtgatgaaatttctgaagttaacttgaaatgtttaagtgtatacaccactgagaattatggtctctttattaggacccaagggaaaatgatgaatgtaatggaacattctagaacattagtacaaatttttttttttttagttgggtgtgcaggagatgtttcccaccccgccccctgcccgccccaccatccaaagacagctgtctccagggtcctcctgtttgtgtcagctgttttcatgatggatatttcatgatggaccaatgtttcacactggtctctttgggagggaatctgcattggtcattaataagctgggtgcagggaagccattttacatgcggaaatacaattacagagaggaagaggggaaaaaatgagccacggaaagaactatatatgcaaatatatatgcatatatgtaaatatatgtaaaatctatgtatctatgtgtattatacactttcaatttgacagtccatatttgtctggctgggccttccacattgcctaacatacactaggtgctcagtatgtgtcttctgttctgatgccctgtcactaatacagaattccatgctgcagtgggaaaagatgcttaaggtaccctcgccagtgagacgaaatatacagtttgagatatgaaacagcttgctgactccaataggtcacttaaaaaattataacagttacctttttaacgcaatgtacagaggacttctatgttgggtgctcttgtgagcataaagataaataatgtggaattcatgctctttaaacatttaaatggactgcactgctggagtatcttactttccatcaatagtgtcatatagggactaaatatgttttttgaaaagaaaatcaaaataatcctgcattaaactgaattctgcacagggaagttttgctatactgcaactttttttttttttttttgagatggggtctcactctgttgcccaggctggagtgcagtggtgcactctcttcactgcaacctctgcctcctgggttcaaagcgattctcctgcctcagcctcccgagtagctgggactacaggtgcctgccaccatgcccggctaatgtttttatttttagtagagacgaggtttcaccatattggccaggctggtctccaactcctgaccttgtgatctgcctgacttagcctcccaaagtgctgagattacaggtgtgagccaccgtgctcggccatatactgccacatttctacacagttatatcaaaagcaatccatgtttatggttttaaaaaaatgaacagaaaagaaaaggtaatgactttgcttacttttattttaaattctgttagcccttcaatgattagtctaagtgatgtgtttttctttgcttgagatggagtcccagtctgttgcccagactggagtgcagtggtgcaatcttggcttactgcaatctctgcctcccgggtaatctcaagtgattctcctgcctcagcctcctgagcagctgggattacagctgcatgccaaaacacctggctaatttttatatttttagtagagatggggtttcaccatgttggccaggctgctctcgaaatcctggcctcaagtaatctgccctccttggcttcccaaagtgctgggattacaggtgtaagctaccgtgcccagccaatgcgtttttatttctagatgtaccaactttagacagtgcctaatgatttctgatatgaaagacaagaggcaaggtatttaatagtctcccctcccttataatttttattagttctgttattatttttagtgcctctagtgggcatttgtaactttaaatatatttaatcttatttctcttgattaatcaccttctgacagtatcttttctttcataccatgtaaaatgaggaaactcacccatctatccttccctcccacctccccgctcacagctatgtctttccttttatatcaccaagatttaaaatattcatactctgttcagtaattattgagtcatcctccttaatactaatttagttaataatttaatttttggtcttgcctataggtcaagtaaaaaatcataaaccaataatgagaatttgcaatattgtgacaatataaatattagtcactaaagaagaaagcagcttgagtagacctgaacaggaggcaatgtcactaaggtagaatgagtgcaaatgttcccgacatttatgtcaaatgaattctcattgttatgttctaccacgtcacaggtttgtctcaagctaaggttatgttctccctaaaatactgttaaatagagcacgcatttagtgaacataaaatgtatatttacatgaaatgtatatagacactttcaaagcattaaaatgaatgaactgtgaaaacaccttccaggccagggatggaacatcatcgaaagtgccttcactggctcccatctcttcccacccttcccaccagctattggtaaaagaattgtggctgggcacagtggctcacgcctgtaatcccagcactttgggaggctgaggcaggcagatcacgaggtcaggagattgagaccatcctggctaacatggtgaaaccccgtctctactaaaaatacaaaaaaattagccaggcgtggtggtgggcgcctgtagtcctagctactcgggaggctgaggcaggagaatggcatgaacctggagcttgcagtgagccgagattgtgccactgcactccagcctgggcaacagagcgagactctgtctcaaaaaaaaaaaaaaaaagaattgtgtgttaatcattctctttgttttctggagagttttttttttctttttaaccgcctatgtatgtattaataaattaactctgttttggtagttgttgtttctaaacttcatacgactctaatcatacctaggcattcttctgagactcacttctatcatgcagtgttatgaattttagatttagccatcatcctgcatgtagctacagtttgttcatcctcactgctgtgcaatactttattgtataaatataccagtttcttatttgttcttctcctgatggacatttagatttttgccatcatgaacaatagaactgcaaacattcatgaacacccttcctcatgcacatgttaggagttctgggccttaagacttccatatggccaactttagcagggaatccaaaactgatttccaaattaacactccccagacagtatatgagacttcaaactgattcacatccataccaacacttgttatgatcaaggttttaaagttttttctaatttaataatgtagaatataattttgttgtggtgtctgcatttctctgagcactaatgaggtaaatattttgtacttgctcttctgtgtcatttcttaaaaattattttttagtattaatttcttattcatagaaacattttattgtctcaataagagtcatacatatagtcgtgtgtgtgtgcgtgtataacttttcaatacatatataaaacttggccgggcgcggtagttcatgcctgtaatcctagcactttgggaggccgaggcaggcggatcatgaggtcaggagattgagaccatcctggctaacacagtgaaaccctgtttctactaaaaatataaaaaattagccgggtgtggtggcgggcgccttgtagtcccagctactagaaaggctgaggcaggagaattgcttgaacctgggaggtggaggttgcagtgagccaagatcgcgccactgcactccagcctgggcgacagagcgagactccgtccaaaaaaaaaaaaaaccaaaacaacaacaacaacaacaacaaaacttttcccagtgttagcctttttattttttctattatctttggataatgttaagttcttaattttaatgtactcaaatttatagataattttctttatttgacactttttgtgatttaagaaaaacatcagaaaaatgttttatactgtcttctaaaagtatatacttttactgatttttaaaaaatacctggattggtttttgtatatggcgtggggtaggagttaagtttcgtttttctccctagaaataaccagttattatggtacttgaagtccattctttctctattaatctatatcatcatctctgccatgagtccagttttcatacgcctgtggatctgcttctgggtctctactcactcactttcattgctcaatttgtctattactgccctcattacttagctttaatatatatttaaaaatattcgtaaggcaaagctccaaccttgctatttaggaacatcttggctattcttagccctttgatctattgtataaatttgagtatcatcagtttgtcaatttccacatacccaaaagttggaaatttgattggagctgtattaaatctatagatatctgaagagaacttgtatctttacaacactgcatcttccaattcatgtacttggtattaggcgtctccatttattttgatatttcttaacgtatttcaatagtttgttaattttctccatagaggtcttaacacatctcttgacagggttattgcttagtaacttatatttttatactaatattaaaagttttaaactataattttcagttgttagtgtagggaaatgaaattaattgtgtatacagcaatcttgctaaattttcttattaatcctaataatctgtagattcttttgagttttctgcataaacaatataatttgagaaaatgaatgttcttctcctttctaacaggtacttttttttcttaatttattgcctcgaccaaggatgtccatccagtataatgttgcataaaagtggaactcatgtcttgttcctcatcttgaggggaacgctgcaaatgtttcaacactaaataggattcttgttttgagtttttttggcagatactgttattgtgttaatgaagtgggcttctattcctgatttgctatttttcctttaaatcatgtatagtgaattttatcaaatgctttttcttaatttattgaaacaatcctatttttcttttaatattttaatataattaatcatgttaatattataaaaaggatccaattttgaattcctaaaataagtacagtttcttaattatgagttatattttaaaatatattttgtacttggctggatggaatttacaaatatttgacctagaatttttacatttatgatcatgaatgatacctgtgaattctttttcttgtactggcttgtcaagttttgatatcaaggttatactgccttgatataatgagttgagaactgctggctttttctaattctctgaagaagggtgtaggtttggaattacctcttcctgtgagtttggtagaattcttagtaaaaatgtctagccttgaaattgtgtggtggaatgatttttaaaaaattactgggccaattgttaaaacggctataggattattcaggttatatttatatgtaaatttcatataaaacatatacatatatacatgtaatacctgaaaaatcattttaatcatagtcatttcgtctagttttgaaaaaattttggtataattttgcacataacatatttttgttcttgatctgcatcacagtttattccctttttgattcctaatattatttatttgtgccttttctctttttgtcctgatcaatctctctgcaaagtttgtcaactgtattataacttcattgaataaacttttggctccattgacatttaaaattttatctctgctattttattaatttctgcttttgttttttttttgtaaatctcttttccatttgttttgggtttattttctcttctttcagctcttaagatagatgcttagttcattaattttttgtttgctagtatgagtcatttccttatttatttagagacggagtctcactctgtcatccaggctggagtgcagaggtgagatctcggctcacagcaacctccgcctcccaggctcaagcgattctcctgcctcagtctcccgagtagctgggactacaggcgcctgccaccacacccagctaaattttgtatttttagtagagatggggtttcaccacgttggccagactggtctcgaattcctgacctcaatggatccgcccacctcagcctcctaaagcactgggattacaggcgtgagccactgcacccagcttctagtatgagtatttcagatgcaaagctgcaactttccctctaatttagtttcttcctccagttttaatattaggtatttctattacctttcagtcccaaatatttactaatatctagagtgattcttaatttctaaacatgtgttttccctcctagtcatattttcattatcaatttctaatttaatcatactgtggttggagaccatggtaaatataatatttatcttttaaaatctgttgaaacttgctttatggtccagtagttgtcaattttcataactgttccctgtctgcttgaaaataatgcatattctgcagctgttgggtaatgtactcttgctcattgtgttgtttaaatcttatgtatccttactaatttttctgtttgcattatacaacagttacgaatttctgtttacatcttccattaagataatacatttccccttgtaatttgtgacttttacttttaaaaatttgaagctttgctatttggaatttacatatatcaaattattttgtccatatggtaagttgtatctttccttgggtagtgaccctttttaactgtagtaatgctttttgcttaaagtttatttttctggtatcagaataaacatatcatgcttttttatcaccagtatttggctggcatatattttcctaacctttttcctttcaaattttctgaatctttaatttctaaatgtgtcattgtaaatagcacagagctagagttttattttttaaatcaatttggtcaatatttgttattgaatcattgcatctaatccatttgtttaaattactgatttttttttttttttttttgagacggagtctcactctgttgcccaggctggagtgcagtggcacaatcttggctcactgcaacctccacctcccaggttcaagcgattctcctgcctcagcctcctgagtagctaggactacaggcatacgccaccacgcccggctaatttttgtatttttagtagagatggggtttcaccatgttggccaggcttgtctcgaactcctggcctcaagtgatctgcccacctcggtctcccaaactgctgggattacaggcgtgagccaccacgcccggcctttaaattactgatttaatttatgctaccatatttttccatatactctgtttcattttctcttcttcaattcttttggattaactaataatattcatattctatttttagcttggtttgtaagatgttctccacatttagtttgtaggttaaataccttttagtatagtttagtgggtaccctacaaattgcaaatatttacttaatttatcaaagcccaaagttaaaatttttatccttctccaaaataattacaggaacttagaagattttaattccacattctcatcttattttatgctattgttttgtggattccaattgtatttattttgattacttaacaatatattattactggtgcatgcaatcaacattgtttaaattttccccatatttactttcactgcatttaatctttctcgcacctcacattccttctgaacaaagtatgtcttttaaaatttcttttgtgaggatttactggtggcatactttcccagcttttgtctgaaaatgtcttgactcattaaattttttttttgcaagatacacaatcctaagctgatagttattttttcccaactcagtgatgcttcagcttctctgtttgcaggctcccactgatgctgttgtgaagtcaggtgtaagttggttgagttgttgaagatattaaagggtattttaatttttatgtgcactttagctataatgtgtgtagtgtggacttttttttttttcatttatccttggtattcactgggtttcttgactctgtggattaatgtctttcaagtctggaaaattctcagccatcaatcatcttcagtactgtctcgcttccctttccctttctgaaattctagttagatgcatgttagacttccccactttatctccatgtctcttaactaatttcctgttttccatttctgtctctctaggctgcattctagataatttcttaaattcaactttccaattcattaattctttctcagctatgtctaatgtgctgttacatctgcccatggaaattctaattcctattatattattttattcctagaattctgtttaacactcctccaagttttcttgctctttaccacatttccaatcctctcttttatttccagaaattaaagcaagggctctaatttcacattctaggcttgataaccccagtttctgaattaggagtctgattctccgctgtcctgtttgttcttgctcttgctcgtggtctcgtttccttttttgtaaggggttcttttctgattgtaagttgctcatttcccttagtgctctatttctgttattattcattcctctccattttctttttctgccaccttgactggctgtgtatcttcaatccctttcatattttccatctgtgttttgctttatactcagaaaaaaaaagttttcaactttatattcaacgtttcagacttcagctattatcatcccttctattgtttgtcaatcatatttttaattctcaagtgttcatttgttctgtaattacctctttttcataccaatctgttctctttttatttaacacaaataatttcaaatctttctaaggactgcaattatacttgaaacttttttcttctttaccttgaattagatttcctagatttcctttgggactagtctttctttttggcgtcactggttatatattcatatttttaaataaaaaattggttaacaaaggtagttggcgtggctttcctgtatcagtattccgatcaatttttctaacacacctatcctttgtagggaagagctgatttatggctctttgtaagtgggcagggtatgctgatgtgaaggattcatttagggctcaagagaagagaagcctccaggcaagctgtaagcccaagcccttcctccacccactcctctaagaaaaatataaagcactgtactttaggtgtatagaatttttgtttatttcccttgagaaatagttgactcttctgccattactccatgtcatctatttttaaggtctggtactatcttagaatgtattctgtttctctctttggtattagttctcagtgaggagtgaactgttcaattttttttttttttagcaaatattatggtactttttgtttttgggggtttttgagaaaaaatcatcctgaaagctctgtgtgggaatccgtgaggatgggggtggaggggtaatggttgaaggatggccaggtgttcccatcactgcaagcaattcgcacttgttctctcttggggtccagtggaaatgtggtctttcctggggctcctgggggctgttcccaccaccactaaaacttgttcctgtctgattcttcctttgctgtgtcacgaccttccctgttcaggggtatttttcagtagggttttattactttcggctttccagaacacaactaaatttctggtttgctgatggcacttattctgatggtgctattttggatttatttccatttctacagcttcatggctattaggtggggattctgaaggaaggggaaggattgcttaaatgcagtcactcaactgaacaggacgttctcataatttttaaaaatgtagacataaatcatccatgttaatattcaagtatctcaatgcttaataagcttccattttataatatcaagttcaattgatcagtaattcagcaaacgatctaccttttaaaagatttgtattgaaagtcattttctgtttatacaatctttcctttagtatctataatacagtctttctcacttcaaagagaatagaagcactggcctaaaataatgagttagtaatcaatccacacagatattttgtttttggtttctctgaagctcagtatttctctatttcttttttttaatttttattttattattattatactttaagttttagggtacatgtgcacaatgtgcaggttagttacatatgtatacatgtgccatgctggtgtgctgcacccattaactcatcatttaacattaggtatatctcctaaagctatccctcccccctccccccaccccacaacagtccccagagtgtaatgttccccttcctgtgtccatgtgttctcattgttcaattcccatctatgagtgagaatatgcggtgtttggttttttgttcttgcgatagtttactgagaatgatgagttccaatttcatctatgtccctacaaaggacgtgaactcatcattttttatggctgcatagtattccatggtgtatatgtgccacattttcttaatccagtctgtcattgttggacatttgggttggttccaagtctttgctattgtgaatagtgccgcaataaacatacgtgtgcatgtgtctttatagcagcatgatttatagtcctttgggtatatacccagtaatgggatggctgcgtcaaatggtatttctagttctagatccctgaggaatcgccacaccgacttccacaatggttgaactagtttacagtcccaccaacagtgtaaaagtgttcctatttctccacatcctctccagcacctgttgtttcctgactttttaatgattgccattctaactggtgtgagatggtatctcattgtggttttgatttgcatttctctgatggccagtgatggtgagcattttttcatgtgttttttggctgcataaatgtcttcttttgagaagtgtctgttcatgtcctttgctcactttttgatggggttgtttgttttttttcttgtaaatttgtttgagttcattgtaggttctggatattagccctttgtcagatgagtaggttgtgaaaattttctcccattttgtaggttgcctgttcactctgatggtagtttcttttgctgtgcagaagctctttagtttaattagatgccatttgtcaattttggcttttgttgccattttgacatgaagtccttgccaatgcctatgtcctgaatagtaatgcctaggttttcttctagggtttttatggttttaggtctaacgtttaagtctttaatccatcttgaattaatttttgtataaggtgtaaggaaggcatccagtttcagctttctacatatggttagccagttttcccagcaccatttattaaatagggaatcctttccccattgcttgtttttctcaggtttgtcaaagatcagatagttgtagacatgcggcgttatttctggaagcattccctttgaaaactggcacaagacagggatgccctctctcatcactcctattcaacatagtgttggaagttctggccagggcaattaggcaggagaaggaaacaaagggtattcaattaggaaaagaggaagtcaaattgtctctgtttgcagatgacatgattgtatatctagaaaaccccattgtctcagcccaaaatctccttaagctgagaggcaacttcagcaaagtctcaggatacaaaatcaacgtacaaaaatcacaagcattcttatacaccaacaacagacaaacagagagccaaatcatgagtgaactcccattcacaattgcttgaaagagaataaaatacctaggaatccaacttacaagggacgtgaaggacctcttcaaggagaactacaagccactgctcaatgaaataaaagaagatacaaacaaacggaagaacattccatgctcatgggtaggaagaatcaatatcatgaaaatggccatactgcccaaggtaatttacagattcaatgccatccccatcaagctaccaatgactttcttcacagaattggaaaaaactactttaaagttcatatggaaccaaaaaagagcccgcatcgccaagtcaatcctaagccaaaagaacaaagctgtaggcatcacactacctgacttcaaactatactacaaggctacagtaaccaaaacagcatggtactggtaccaaaacagagtatttctccatttcttacatgtttactggaatcatgattcctaaccatatacaaaaacagcaagggaaatgctggtggggtcagttctcctaaagtttcaaatgtgctgtaaattgcagagaattctcagacttaataggaatattatttttgtatacatgtgctggggttttggagaaagatttatttaaaaatgaaaaaaggccaggtgtggtggctcacacctataatctcagcacttttggaggccaaggcaagaggaccgcttgaggccaggagttcaagaccagcctgtgcaacatagtgaaatgctgtctataagaaaaattttaaaaagtggtatgtgcctgtagtcctggctacttgggaagctaatgtgggaggattgcttgagcccaggaattcaaggttatagtgagctataattgtgtcactgtactctagcctgggcaacagagcaagaccttgtctcaagaaaatgaaattaaaaaaaaaatccccttactcctagaaaagaaaaagccaatcaaaaacctttcttggacaatgaaatgccagagggttttataccacacagggatagtgccacatcatgtcttgtagaagaagcatccgtttttatagaatctaaattgcagtgaatattatagcatgccataaaaatatgccgggtgcacacagaaatcacagcagacagtccttggacaataattcaatctcacggtgaagtgatagcagcagctttctgggaatcaacagagtgggatgaaaagctcgtgtctttggggcagagagccctgaattcaaattctagctgtcatttttttagccaggtgattaaaaaatgactcgttattagcctcagaaactcatcttcttcatgtgaacactgagatcatgcagctcatgcagctattgtaaagattaagtgaaatactgtaagtcaggacgctagcgcagaatagacactcaacaagaatttcctttgctcttctgtctgtcaaaaatgccaagctggcagaaggtgcatttattcatctgtgggattccccctttaccctgaacatttaaattcaatggtgagacacagggaggaaagcaagggtaactcttcaagacactctagtctgtggtgtgcgatgctgacgtctgtataccacgacgtggacttaaccaagtgtttcttctgatctcttttcttaggactaaattcatcattttcttcagatttcatgtcttttgtcattttgcctcatcgctggtgcctgtacccacagcaaatcccaacagagggtgggataattaagtgatattgcctccgcaccactgtgccatcaccccctccaccggcctttctctagctgcgcatgaaaattctgctgcttcccagtgcatttgccaggacatcttttctctccggcccatttgcctcacagatgcccagtggttgagcctcagttccacagacagatctacagctcagaggatgttcagtcttcaaatgcagctttgtaattggcaaggggtgctcttagcttgctggctggtcgtgaaactaacaaagcccagtctttgtgagtgtgcttttaggacacgagcagggtagcttatgaatttttaatgctcaagccaacgttaataccaattagtagtgccaaagaagagaattaaaacactacttcatggaatgatagcatcctctctttgacaaaaaagcccatgtgttttaatagccaccaattcaataaggaaactgcttcttagatagttgagtctgtctatttctggaagagggcacagtacatatacccagccggttgtgacttttcttcatggattctaaggtcaattatcttaaggtctactgattgattttctttgcccactcattttcctttaatttagacaaccaattatgtgccttttaagtttttttctccctccacatatactaggaacagccataataaagcatgaagttcctttctcttgggatggctttgaaattcaccattttctgttttggccttcctttccttgaatatgcacacttaaggtcatcataaatcttattcatttgggcagcacttgaacaaatggcccctttccccagttttttagtgaatttctttgaaacctactgtccaatgtgtgctcatcctccctccccttctgccctctgcccccaccccctgctccccagatgaaactccagagcgaagtctttcttacttggattattgtgtccagaggatacaagctgagagtcctgaaagaacaagaaatatcaattaattttcttattttgactttcaaaatccaagttaaacatgagatcatgtttaaaactggtcattcagaaccgattcattgctctcaatctctatcagctactttaatgagaaacatatacatgaaggtggacacatacatgttaagcagttctgggaatatacttcacaatcatttttcttttgtattaatgactttctgttttgtttattgaggtgaagttcacataacattaaaattaaccattttaaagtgaacaattcagtggcatttggtactttcataaggttgtgcaaccactacctctatctagttacaaaatatttccatcactctgaagtcaaatcccttacccattaagcagggtctcccatacccctgccctcccaatgccccagcccctcacaaccaccaatttccatctgtctcttggatttatctattctggatatttcatataaatggaatcatacaatatgtgacctttgtgactggctttttacttaacataatgtttttgaggttcatccactctgtagcatgtatcggttcttcattctttttatggctgaataatattgcgtcacatggatatacaacaatgtgtttatccattcatctgttaatgggtatttgggctgtttctaccttttggatattgtaaataatactgccacgaatatgcaggtatgtacactagttcgagtccatgttttcaatccttttgtgtatatacttaggagcagaatttctgggttatataactctatgttaaactttttaaggaactgccaaacgattttccacagcagtgaaaccattttgcaatccaacaatgtttgagggttccaatttatctacacccttgtcaatgcttgttattttccattaaaaaatgatagctatccttgtgtgtatgaagtggtatctcactgcagttttgatttgtatttccctaataactaatgatgttgagcatcttttcatgtgtttgttggccatttgtacatctttggagaaatatctattcaagtcctttgccattttttaattggtttgtctttttgttgttgagttgaatgagttcttgatatagtttggatactagactgttaccacatttatgatttgcagtatttcctcccatcctgtcaattgtcttttcattttatcagtaatgttctttgatgcacaaaagttctaaattttctaaatttaaagttctaaaaatttttaataaagtttagtttacctaatttttcttttgttgctcatgcttttggtgtcatcgctaagaatccattgccaaatccaaggtcatgaagatttaaacctatgttttcctccctgatacttatggtttgggttcttatactcatgccactgacctattatcatattgacttttaatctaacttttctttgaatgaacctttactgccacccatttcctgtagatgggtttggcaatcatcccaccagtaacactctattaaacaactgttgtcaatctcacgatggtggataaaaagattagtatggtatctacttatctgcaatggaataaagccagtactacacagtattttaagtttagttattgctcaggtaaatagagattgaatttgattttacttgcattaaaacaaaatgttaaaatctgttttgaggatttacatcctctttctttgcaaaattctcatttaatagaaagtaaaccacataccatatgttcttataagtgggagttaagctatgggtatgcaaaggcacatagagtgatatgatgaactatggagactcagaagtgggaggataggagtgggacatgagataaaaaaactacatactgggtacaatgtacactactcaggtgatgggtacactaaactctcagacttcaccactatataatttatccatgtaaccaaaaaccacttgtaccccaaaagctattaaaataaaaaaaatttaaatatgaaagacttacacaagaatgcgtgaataggaatgtaaaaaaaaaaaaaggtagcaggacataaaatccagcaaaactcctttaaaattttggcacatggaacaaaaatccattgaaattgaatgaacttctattacgtggcttaatgtattttaccagaattttgttccacgagtatagctgttatggggtaaagggtgtcatttgatgtgacttgtgttatattcaaatccaagtactaatgtctgctttaaaaagaaattctactgaaacagtataaaatgagccagtcggtgggcagaggttgggtaggaaaattgagacgggaagggattcccactctattaaacagcctgagtcatatgcagatgcctaataaacctctttcaattatggtaataatgagctattcaactgaagaaaaagaacaagctcaactctcaccctgagattcagtttttggaaatgattatatgaagatgaaatatcgttcctgaaatggactaaaatatcatctgtaagaatgattttggcctattttggatagatgctgtcactaagaagacatccacaattaaatcccccatgtagattggtacgttttccttctcttcaagggaattcaagagtttatatctggacataagttagttttaactttggcacgtgaaaatactttgagtcccatttagttaactctgctgtctgtagatctgggccatttggtggcatctgtactagggaggggaaatacacaccatcaaatggacaagaatggtaattgacatagtttccagcattaagcttatttaaaaaaaaaaaaagaaaggaaaaaaagaacagaattttttctaagactgttaacacaaaatataattattttatttacttatttatttatttagagatggagttttgctcttgttgcctagtctggagtgcaacggcacgatctcagctcactgcagcctccgcctcccaggttcaagcaattcttttgcctcagcatcccgagtagctgggattacaggcacctgccaccaggccctgctaactttttgtatttttagtagagatggggtttcaccatgttggccaggctggtctcaaactcctggcctcaagtgatccacctgcctcggcctcccaaagtgctgggattacaggcttgagccactgcgcccggcctatcttatttattttttagagacagggccacattctgttacccagtctggagtgcagtggcacgatcatggctcactgcagcctcaaactcctaggctcaagcgatcctcctgccttcgtagctggtactacaggcacgcgccgccatgcctagctgaaattgttaatttcttggtatgtcctaaaacccacaggatgattgttgatcacaagcagagaaccagagatgagcttacagatgacctgaattaggattacaaaccataagatcatgtatcccatagatagtaaactttaaattttaactaaaacacctgtgtgattaataaccattattatttctgttttgtgtgatagggagtgaagagagacttcaaaatggttgaaataattggtataaaaaaaatctctgtggaagtcttctgtaggagaggcaagaataaaatcaaagactttgtccctaatatatactctcatgttgctagctgatgttttcttggtggtacattgaaacaacaactgctagtgccaaagtaattggctataaacccagtgttctaaactgtgccactctgcgggtacaaataatgtcccattatcattcttaccggcatttggccagcctgcttgtggaggggtcagctaccttaccaggccactcccacattttaggtcctcttatcagacaccctgataaggtgtctgctggcaaacctcgggtcctggggctgcagcttttgaaggaggactgttcttcccagccagctgcaaaaccccaggggccccacaggctatgcagctctcttattcttcacagagccagagcaaggctgggtccagaacagagggagaccaaagttcctttctccaaagggaccacacactgaagtcctttccacttttgtgtctcctgccaccccatccagatacctacatatgtgtagcttctgtctcaccagccttctctccccttgcaaatgtcttctgtaggtaggtgcctggggaggtccagccccatctgtgcattggtattgtccccctctgggagcactctactaggcctgcaagattctctactaggctttttaagggttacagaagtgagtccagcaagttagcggtggaggtgacatgtgtacaaatcattagagcccaaggctgaaagtgatgtggtgactgccactcccaatacttccagctgtgtatcctgttctgatcccctccccctggaatgctcatcctgctgctttctgtttcctgcctggcaaatttcattcttccttcgaggctctgcacaggtaaactcaagggttaccctgtgctttgaaaccttcttgactctaatgtttttgctacactgtgtcatacttccattacagtaattattttttcaacaatgactttaaaaaaaagtataagtgacaataacacaaaccgtacatatttaaagttaacaatttgataacaagtctcacatgaggaaggctaccattattactttcttgacccaaggatggctctgtaacacctattcattgacgaaaaatcagcaaaagtgttagctgccagcccctggaaaccacgattctcctcactgcttctgtgtgtcgattttagattctacatataggtaatgacatctagtacttggctttctgtgtctggcttagttcacgcagtacaatgtctatgctgtgtgtgtgtgtacacatatgtgtgtgtatgaataatatatgatgtatcagaaatgtgactatagttaacaatgagggtagatctttagaaatttattaggaggtaatgttctcatcaccaaaaagagaaaagaaaatggtaactatgtgatatataacttggtaactattgatatattaattagcttgattgtggtgattatttcacaatatcaaaacatcaagttgtttaccttaaatacatacaatttttgtcaattacacctcaatagagctaaaaaatgaaatttttgtactaatgatttaaagtcttaattttacctcagaagtcaagtcattacttgcacttaagcatctacatgaaacaaaacagaacaaactggtacaatatttttggaaaagtcgtaataaactgtgctttggtatgtgcccagttatatcaaaagttgtacttataccatgatacctacacataacaaaaatgtctatgattctattttgggtctggattatcttggctagattacgtgcaaagattctaagcattgtgcattttattctaaggatggcagggtgccactggaagtacacactgaataaactgttcagttaaattcccctgtactcaatggaagggctagaagcctgggaacttcacatgggttctgatgtcaattccaccaatgagatgccacatttcattcactgaggtgttgcctacaaagccttaactatttactatatgatccttcactgaaaaagcttcttgacctctgattcgaacaatgaattcttgggaaagaattagataaacatgtcgaaaaacagaatagacagtccggagacaaatccatgtatttatgagaagctcaactattgacatagggtatttcaaaccagtgatggggtgaatgggctattacactgatagtattataataacttactgaccattgaaaagaagaaaacaagaatcctacatcgtaacatccacaactaaaacaaagtataagagaattagaataaaatagaggacacttagaatattggagcaggaaagatcttttttctctgacataaaaattaaacactttgctagtgtaaaagcacataaaaaaggtttgcaagaaagtagttgtatcatatataatagataaatgaataagagttaaggagttcctacaaattagtttttaaaaagtggtaatgggtaatgaacaggcaatttgcaaaggaaaaacagtcaatgctcaagcttagaagtaactgggaaaatgcaaatgaaaacaacaagatatcaacttttcattcatcatacagacacactgataaaaaacccagatgataataatcattggcaaagatatgtaaaaagtactttttttttttcttttcttttttttttttttgagacagcgtcgtgctctgtcacccaggcgagagtgcagtggcgtgatcatagctcactgtagcctcgacctcctgggcttaagtgatcctcctgctacctcagcgtcccaagtagctgggactacaggtgtgccaccatgcctggctaattttttcatatttttgttgagatggtgtctcactatgttgcccaagctggtcttgaactccagacctcaagcaatcctcctgccttggcctcccaaaatgctaggattacaggtttgggccaacacgcctggccaaaagtactcttgaaacacaatccaaagtaactgtggcttctgatgcccagaaccacaattcctactcaaggtatccttattagaggcattcaaagaggcatttgatctaacagtgtttgtaataataacaagccatacataatctcagtgtccactgaaaggaatctgattaaattatggtaaatttatacaaaatattttgctgctgttttgaagaatgaagaaaatctctatatattcacttgaaaaggtcttcaaatacgttttattgtaagaaaaatcaactcttagaatggaatttatctttgtgataacagcatgaacaattctttcaataattcaccttagaaagcggtgatattgacagttatttacttttttgttttgtttgtttttgaaacagtctccatctgtcacccaggctggagtgcagtggcacaatctcagcttactgcaagctccacctctcaggttcaagtgatcctcctgcctcagcctctcaagtagctgggattacatgcatgcaccaccatgcctggctaattttgtatttttagtagagattgggtttcagcatgttggccaggctggtcttcaactcttgacctcaactgagccacctgctttggcctcccaaagtgctgggattacaggaatgagtcatcatgcctgaccagaaagctgtgatattgatatttagtaacgatacatattgttgaaaaaaatcaacttttggaaaaaatgctcttactatacaacttaggaattggaaaaatatacatattttctatatataatgcacagggaaaatgaaatggcacataaactcctgatagtaatctctgggtagggaaataatctctggcttggagtgccagggatgttgagattttggtctcttcccatttgtataatttgatccttcataatgagtatgtagtatgtgtcagttattcaaatcaaagaaagcctattagactcatgtatatagtcatttattttgtggccaattttttggtgtgcttttccttagaaaatatagatatctttttttaagtcctagaaaatatcttaagctttaaaaaagatattcagggaaattaaataccacacgtcttcaatactaagacattgattttaagatacatcattaatttaataatagcttttcagaaaaatccaggacatacaattttatacatcacattgaatgtttaaaatgattataagatgcatttcaacttcatgaatgttttttagacaaaatgataattacagtagtatcacattttgcagagaagtgtaggtaagtaagattggaggcttgattctccccctttcataaatgaataagtatgcgcttgcaaattgtgaaggatcagattcacgtgcctctggcaggaatatttacagaagaaaagacaatcacgggtaaagcccactgcccactagaaatgcctgcatgagtgaaacatattcctcctgagggatgcaagatctcaccttatttggaaatggaaatttggttggttccactttgccaggtgcttgaatagcagaaagtggtggaagccaggtcatctcctgaaggacgggataaaaacaaacaatattgtgatacagacagtatttaaaatcagcggtatgtaaagcagctgtacaagtgggccttcataaggcagggaagggttaaaaaatgtacaaaggctgaaagaattttaaaaaaagatgtgaaatccacttttatgatttcatttcctaattttaccaattcttgactccttggctctccccatgctccctttataccttaaaaaagtttgcaaggctgtcctattttcacttcatttaaggtcctgagtaaagggacaatctagtagcaaaagttctatggaaaatgccacatgaaggggactcggacttgatcccacagaattcacagggtgtctccaaagaaatgcataaggtacttttaactttatgaatctttattagaggagttatttatacaattagaaataaagtatcagttctcaataaggcccacacatcactttggtcttcataaaatgtcattcacggagagtgaaaaaacaaatcacgcctatgaaatacagagacagaatgatgtcatttcttataacacagtattaagaacacaacatgagcttaacatggaataatttctcatccactttttgacacactttctctaagccttgggaaagggagagaggggttgttttattcacttccagtattcaccttcagtttcatctctggaagggagttccaatcaataaatgattacagaattacattgatttctgatgaccaggacgccaacttggagtttacgaattagatgtgaaccctattattattattattattattttttgagatggagtctcactctgttgctcaggttggagtgcagtggcgtgatctggctcactgcaacctctgcctcccaggttcaagtgattctcctgcctcagcctcctgtatagctgggattacaggtgcgtgccaccatgcctggctaatttttgtattttcagtagagatggggtttcaccatgttggccaggctggtctcaaactcctgacctcgggtgacccgcccaccttgggctcccaaagtgctgggattacaggcataagctactgcgcctggccgaaccctatttcttgatttgcctgcacttccaaacctaagcaagcacagaagcagtggtcgatccattttcagaaaagtgagaaattctctcgctcgaggtgaggacatttccttacctccctttggcgggtgggtgttgaaaagcgattctgtcaggcttttggaaggaaagagctcttgggaatggtcgggcaccttcttttcttgggtcattcacctcccccagcacctcagatagtgcagaacccacacaggaagccgtgggagggcgagtgtgttcaaagccatgtgggaaggatttactgaccccatatcatctctcccacaccacgacacgtgacacagacagtaggtgggttaggcacatacgcattctaggtgtcccttctccattctggtgttaccaaccaattgtatacaattttatacatcacaaagcaaagcaaaggtggatccagtgaccctttaaactgtccctctctcctcccatctctgccctgctggtgccttggtctccctttgaggaggctgataagcaggactgtcaagtttgcgtccacagtggcatctttgtccatggagtcaaggaactattcgtcattctcagagttgggccaccttgtctaggacctggtcagctcttacccagagtgttactacccgattaagaaagccatgaagacacaagtgggttttccataccttggctcccccatagggccatctctcctctacaaggtttctgattttatccttccattttcattactggagaggatatgtgattttgctataagtggcttcaaatcttctgtagagaaattattcatcaattacaaactattaaaccaattgtccttttcctcttttgttgactgtctgatgtgtccctgagtccatcccactgctaatcagccactcaatagcttcctttgcaatcactctttcgcttacacaatttacattgtctgatcctcaggggacaacattgcgaagtacaaactaattactcatgattaaacatcagacttacacataccaccccggtatgtctatgttaactttgcatacagactccctctgtgtatcagaatgcctcacatttgtgcaatttttctctgactgtagctaaaatccaaaaagataaactattatttcagcgtgtcctccagcaactcaagaataaataaaatgaaaagtccataaaaaatgagtaacagtactttcaaaagaacacttcctagaccaacagcttcttacaactgacactttcaggttcaaatctgtttaatacaccgtttatccaagagtggaatagcagacaaactttgagataccactaagctgtgattcttaagggtggaaactgtcctcctgatcttcgtaccttaatcagggtccatccctgagcacccactcatcccctgaacatttcctgaaaacttaccattggcaggcactgtaactgtgtcttatgtacacgaagtgctcagttcagcatctactgaatttgaaagttagggtatcggctctggctgtgtctattatcagtctttcttctctaattccagctatgcttgtaatcaatctttccatttctttctttcttccttccctccaactcacctattcattaatccaataaccacccaacctcaaaagcaatatccacagaaggcagatgacacattctcttagcttgctgtcctcatgcaaataccccttctcctttgaagctcttgccaggtggttttggaccctcactaaagatgagctgcatctttttctgtccactccactcctttaaatcagactaacggctccctccaaaattgcctcctgccctccctaccttcatgatattttcctatttttttttttttttgagctggagttttgctcttgttgcctaggctggagtgcaatggcgcgatctcagctcaccgcgacctctgccttccagttcaagcaattctcctgcctcagcctcccgagtagctgggattacaggcatgcgtcaccacacctggctaattctgtatttttagtagagatggggtttctccatgttggtcaggctggtctcgaacttccgacctcaggtgatccgcctgccttggcctgccaaagtgctgggattacaggagtgagtcaccgcgcccggcccctattggttttttaaaggcaactgggcaatcttatgggcacccccaagcatttcttttcaccttcttgacatgttcttcttctgagtccatctctgctcccctcaaatttttggcttcacaaccctgactttaactctgatctttggacttcgtcttgaagattcggaatcttggcttttcccagtctactctgagccagctcattccagggaatcgccaggccctatttctcatccggtaaaaatcggcatatcaaattgctcttgaaattcaacacccaacactagccaccttgcagacatcttagctggcttctcctacacaaggggagaatcaatggtaggtccatacaaatctggatcaagccctcatgtctccatttttggaccaagctctcattctggcttctctgattctatacttgggctccttaggaaaggtaactgtgcacaatggtgggatacagaagtaggacacggacttctctaaacttgggccctcctttccttctcctttgaggctcttgccaggtggttctggatcctcattaaagatgatctgcatctttctctgtccactccacccctttaaatcagcctaatggctccctccaaaatcgcctcctgccctccctaccttcatgtctttctattggtttttaaaggcaattgggcaatctggtggtggcttgggccatgtggcttgggcaatccttgaattcattcctagtctgttcctttttctgagttcctcaaacattctttccacattggtgatttttcttgagcctcactttgatccctgctttctcacaacaggtgaccctgcctcctatggcactgaataaacaaaggctcttaagtgtaaatgtttcccaaggacagacctgtgggtgttcatgcctgaccccgttgccttccttctggtctgactggaagaggcatgagttccaagctaatacctgcctgcaccctctgtctgttactctgtccttggggatccagttccatcagtatctcactggtattggtttaacatcaatctttccttctccactggctttttcccccaagactgacaaatgatctcaggcctcagcccttcctgacactgtattcctcctccagctgatcttcatttctctatttctcttgatagctaacactctcaaagaagtctttatacttgctgttttgacatcctcacctaccatttctatttttgacttaagattttttgttgcagattatacacataagagtccatataatattgtgcatgtgtgtgtgtaagcttaagattaatgaaacgaatacctgtgaactcatgacccaccttcacatttccaagaccttagcaaccactttcaatagaagcagccctgacataactccttctgttgtcaagggcattggatttccttgaatgctcatttccccctgactctcttcccccgtggctcccacgctgtcctcctggcccagctccactctcggagatctcatgctcattcttttttgctgaaacttcttttctctcactgttccttgggtgttttgtgttcagccttcctctcactacccttctttccctggctgatcttgctactgtggctttaaaaaccatgtggtatgctggtgatgcctaaaagcacatccaggtctaacgtgcccactctagatgtctactgagccactcaacctgggtgctcatgagcgattcaaactcaccatgtttaaagctaaacttacacgccacacaaacttttcttcttcttgtactttatatgctggttaatggcagcaacatctattaactcttcaagtcagcatacctggagttatgccagattccttctctttcactccctctctcataataataacaataattctcatttattaagcatttaaaatatattatgcacgattttaaacgctttatgtgatttgcttaattctcatacccaccctgaaaggtaggctttattattttcttactttatagatgaggaaactaagtcactaaaaggttaagtgatttgctgaagttcacccagcagctggacttaaccatatcctgggctacctctaagtggatccaagaccttgtatattctagccaactcctaactccagcctctcaagctgagatcccctgaatataccacgctttgcacatgctggtagcacctcccaacctcctattgtttgctgggttgtttactcatcagtcaagacccagctccatttcctcctttgctatgaagtcttctttggccaaaccaagccaccgttgactcaaccttcctttgtgccacatttcccacgtacaggtctcttttagaacacttgtcccctctattgtggttacttgtttatacatcagtgcctcccctctaacctgtgatgaacccctcaaggctgtgtattttttgtctggtggcccagcacctaatacagagcctggagcagaatgggtgctcacttcatttctgaacaaatactgaattgaacattcagcagtgaatctctgcagtgtgtctacctttctctcctttctgttacctgaactgccatcctaatcacaccttcattatctttaacctgaagtactcttatagcatcctgattggttctctgtcttctgttagcagtccaccctccacactgctgcaaactcaattttcgtaattcagaaaaacttcactgctctaaaaatcttcacatgcggtcgggcagagtggctcatgcctgtaatcccagcactatgggaggccaaggcgggagggaggatcacctgaagttaggagttgggagaccagcttggccaacatagtgaaaccctgtttctactaaaaatacgaaattagccaggcgtgatggcgcgcgcctgtaatcacagctactcgggcagctgaggcacaagaatcgcttgaacctgggaggcagaggttgcagtgagccgaaatcatgccactgcactccaggctgggtgacagagcgagactccatctcaaaaaaaaaaaaaaaaaagcttcatatgcatcatcacatcacaatgatgatgatgatggcaatggtgacgctgaagatgatgatggctcctattaagttttagttttcaaaatacttccccatgcattttgtcacttatgcccaatctttaacgcaacaattgccatctccatagtacagcaaggaagttaaagctcaaaaagattaactgattagtccaaggtcactcagtttctaggtttggccagataactctttactcccagtccagtatttgttttccaatctattgaatttaccctcagaatcctcaccctagtactcaagaccttctacaataaggtcccagtcttcagcttcatgcctttttattgctctacaaatactctacctacaagaaaaactagcctctgcttttacttacaccatccccttagtgtgtgaatacccttcctcatatgtctctgagtctctttttatccattaaggctcatctcaaacatcatttgtgtcttgaggcttttgcagatttcccttctatgccaatataataggatagttctctgctcatgctcctccaaagcacttatttctttttctcttacattctgttttgtgttatagttttatgaatatgtacttcaatctacacccaaccatttatctctctttgaatgctctttctccaatgtgaaataaaagcaatacttaggaatcctaataatctcttttaagagcattcagttttactaggcataatccccaaataggaattctaataatccctttcaagagcatttggatttactaaacataatcgcctaaagaagtaatataaatttcctctgagagggatatttacttatctttgtggagactggaacatcttacatagtaagtgctctatataaacttgttgaattgaactgaacatccacatttcaatgcaaacttgcttgctaattttgctttaattatagctaagtatttccgtgtgatttttccatctaacaaattctactaactacatgaaggaatagtaaagaaaatatggttacttaaagcattcaggtctgtaagaatttccaaaacctaagaattatttctatgattttaatacatttataatgtaatgcaaatacaaaatatgtaatatacatacaaaatgtaatttatgaggtacaatgcttttataagattgattatccattacattaaaatttcacactagaattgcatgggaaaatcaagggcgaatggactatcctgatttcctcttctatcacttgctagcctcctgagcttaggtaagtcacatgctcagtaaactaccgtgatttcaagctgtggactttacgatcaatcagatctcagtttgtggtaccttacaaccagaggaaatggggatataactatcccatggtttagtcataaagattaaatgagatcatacatacatacatatataaagaaactagtatagttcccctcccatttaagcattcaataaaagacagtactgattaatatcaagctgagtttctgaattgtctctaaaatgagaaatataacttcactctgagctttagttgttgggagtctgagatgagagaatatatggggaagagttttttaaataaaagaataagtatcatgcaaatgtagcctgtaattaagctaggattattaatgcaaactatgtattactaaaacagaaagatatttaaagagattattattattcctaagtatgatctgtactttttattggagaaaatgtccctaagttttttcatagaaacagatttctgacaaaataatagtcagtgggataatacgatttgataaaaatgtatttcatttgcacctcatttctggtaatgatttaaaatataagcaaaggtaaaatttatcattcctgctaaaattgcacttagcttgctccacattattttatcactgagaaacaatgctatttcattacaaggacactgatcccacgtcactgtagccatggtcctcacccctgcctgtgttccccacttcacccccaaccaccctttcattgctgctttgcctctattgacctactttggccatcctttaaccacttcccagaccatatgtaagacaggaagagaaatgtaatgtttaaagccacttactccaaagtctagctggcgaccttcggatcttataaactcccctgccctttctttgctttgtctgccttctctcctttttcattttcttgtcactcaggaataagcctgtaccctattcccctactcttgagaggtcctcagttttgcccttggggtttcttagtcacctgcccttttttttcctttttttttttgagataaagtctcactaagttgcccgggctggcctcaaactccggggctcatatgatcctcctgctttggcctcccgagtagctggaacacaggtgcaggctgccatgtcccactccttagccttttagatactccaggtgatggaactgagaatccacgtatctgcctcaacacagcatcgccagtcccttctccctacacagatgtctagttactcaagggatacgttcaggtgacttcttttttttttttttgtataggcttataatgccaagactctttatattaaatatactcacttttctcctaaaatgaaagaatagatggttaaatgataaggacacagaatattgctcttcataactggctaacgttttctctatcctccatatcccaattttcaggaggtcatgggcacatgggccagtttccattttcacgtctactctacagcaagactgacgccagtctccaagaacccacacactgatggtgcatagactttcatgtgctccatctgcacaatgccctccatgtagctgaccactcttctgatgccagctgcctctgcctgttttaggacaagtgacaggaggccttgggcatccccacctcacgtagcagctctttgttaccaaaggagagaagaaacaaaaatagaattttagcctcaagttaaatcttcgagttcagagtgtgcagctatgaagacctgcaaagtctgtttagcttacaataggttcaactagaaaaaatttaagccatgttttcatttccctattaaaacaagtgaggagaaaaacacttttcctggtctctctcccttgtctgtcactgccacaggagagttccatctcgaacacttactatgtcacctttgttccaaagtttccagtgaccccggtccaattgttcaagatgctctgtcacatggcaccatcaaggaccactgtggcattaccgcctgctgcttttctatacactgtcttccccaagcctgatgtcttacttcttgtcctgccccaggctttcctgcccccatcttgtttctcttttcctttcacgttattccatctcacttacctctgcattctttctcatcctggcctgtctgtgaaggtgacctgtgctaccctgagcgagccctctctaccctccacttatatataatcaatgccactttttttttttttttttcagatggagtctcgctctgtcacccaggctagaatgcaatggcgtgatctcagctcactgcaacctctgcctcccctgttcaagcgattctcccgcctcagcctcctgagtcctgggactacaggcacatgctaccatgcccagctaatttttgtattttttagtagagacggggtttcaccatgttggccaggctggtctcaaactcctgacctcaggcgatccacctgccttggcctcccaaagtgctgggattacaggtatcagccaccgtgcccggccaatgccacttatttagcaactacatgctactcagtgctgtgagctttcttgtcatgtgttaccactatcagaatatttttaaaatccctactagattacaaactcttcgagggaagggatcatgtctaataatgctcttgtaactcctcaaaggcctagcacaatggtcagaataataggaattaattgaacttctctgtaagtctcttttcttgcctgtgaaataatggtagcaagaaattacactggtttcaccaagcgtatgtgactgttgccaggattgaaggatctgcctggcagatgaccgcagttaactccagaattctttgtgctcagaaacttactgttttctaaacaagacacgggatgaattctgcgacttgggaataaaaatgcaagatgctcacgttgatgtttatgtgtggcagtggctgctgatcacagtgtgatttcattttcagtttctgtatcagaataatcattcagcttttcagttcttctcacacgtattattcgtgttatgacactcttatcagataagtgctgccaacaacagacatggtgatttttacaacactgcatctcatctaaatgctggcagctaatgccactgtacctggtgaagaggaaaacacccctacgggcctgtacctgggacaccaggcagtagccctggagtaagatcaagtgggagacacatattcctcccctaatgggactgcagtgtgcattctgcctgtcaatccattcctagcatttgtgggcaaagacccaacatccccctttaaacacagattccagggtcaggctggaaggctcagaactaggaagtcacacttaaaacctttaagttggcctctaaatcaacaaaaattcacaaacaaccttattttaccactctacagtaaaaaacaaacaaacctgtatagtttgaaaaataataaatataatgcattcatatcgattaatattaacaggccaggaacagtagctcacgcctgtaatcccagcactttgggatgctgaggtgggaggatctcttgagcctaggaattctaggtttccgtgaactatgattgcaccactgcactccagccggggtgacagagggagaccctgtctttaatcacaacaacaacaacaataattagcattttgatggaaatactactgattgaaaacttttaggaaaatggtagctgctgaaaaaagtgcctttaaaaaatatctatttctcatagtatagcataggctgctaaaatgccagaaaccaaaattgcaactgattcaaacacagatacaaaccagcaaataaccaaaaagactgcaaaaaagagggttaacaaaaatcgtagcaaaatcttgtttcttcaatctgaaaacccaggaatatgtccagtttgaactgaaacaggcctgagaaggggattcctgggagctgtacacgtgttttctggtcttataccgacccactggatgacaggatctcagaatgggacgctgattaatctacttcattgcagtgcctgagcttctgaactctgcccctgcctgcgatgaggttaatcatcaaaggataaaatgggggtaacaatcaatagaatcagtttgagaggcagctttcagttcaggttttgcagactgacaagtacgaaagtagccattcaaactggaaacactgagggtaactcagacctgtgcatcccacttgctccttggtctgtagattctcacttatctaaaagcagaggccacagggcatctggcctttcattacttcctttgcatcatcaaaagcactccttattgcagggaagtcaattccatgccactggagaccctacctttcacctccttgacttcagcttccctggaaactgaactctccacagagaggattagaacattgagaaaagtcaagatacagtcttcaccttaaaagtttgtttcatgctagatcccttaattttggacctttctggagaattcttgttctcgttttgcatttttccagctttcttttggggcagaggatgagagtcacctgtcttattatctctctgtgtcaagtacattcctgttctatttatttacttgaaacttttttgaacaataaaaatgaaacattaaaaaaatttattcttcgatccacctggttttcaatgttcattttattacttgtgtttaaaaaataatatgattctcattctttaacttgcagattgttcttagaactgagcattgcattaaaatattcaaagtagtaacatttagattgggtcttcagaattttaggaagatggttttgctgctgagtatacagctgcatggactgagtgactcttgttaaacccaggtgactccaacttcaccacggagtccctgctgcaatatacagacacctgctagtttctggcactccttcaaatctcgtgctcatgatgagaagcaataattggcctgattttaaattttaaaaatgctttttttgacaagcaaaaaaaaaattaaaacatttgaggggcactgagagaatttcccaaattctgaatctggggctgacacatcactgcgtcatttctgagccaaatcttgtcaaatcgtgttaactcgaggtttataaaaagtgagccaaatttctgatcagctcaggagaaaatgcacgttactaactatgccactgacactttatttctgactcacataatactttttagtggtagcacaaacacccagaagtgagccttcctaacagacaaatagatgatcgttgaactaactgtggcttgcaacaatcaaaccactctttcatatatacttaaaggaaaaaatggcattatttgggacagactggaagactgtggaggctggaaggagaagggggtgaaaattacattcttggccacgttttccacacaacccattcctgaacccctttccacagacaatttggaaatgtgcattcaataaaacccctgtcgcaattgcagagaagcagagggtagaagagatcgggcttggagtcagcatctgggaaaccttgtataattttggccttgccataaaccagcagaatgacctcgggcaagtttacttttccgattattagtgtccttatctgtaaattggtatcaatcattctatcttgcaggattacctgagtggttagtgataaatatacaaagaacctagcgtaatagctggcacatagtaggtgctcataaaaaataattattgctgtattgctacctttataactagtgttgacagcttctggattcgacctggtgaggaaaggggataaatatagaagacgtttatgaatttgttttttaatctattttactctttaattatttaatatttaactggttaattattcatagtcaaacagaaggcttaataaaaatgtgcttattaaacaataatttgcttccttaactcccttcaccactaaagcagcatgtccataaagggaaggaagaatgctatctcagggtctggaatttttcttcaaagggatagttactagaaatcagcatacatcctctttctagtttggggctctacagattagaagctttgccctcatgctatagactacccttgcaggcaccagcttgggtagtataggaggtgttaggcaagctgggagtgtagcgggaggctacctggctatgatgacagggcagtgattactgtccaggcaggtggctgagcaaggtgacaagcctgggcaagaataaaccctggaaactactggggccaggatcaaagttcccggtcaggtgggacttctggtttaccagagggaaggttaggacaatcctgccgaaggcacatgcctttctccctttcaaatgtttcccagctaaaccacttccaaatgagcaggcttctactaactttatgcaagtatttttctcagttttgagaggtgatttataaatcactgaatggcattgccctaggacagcagggatgtctctgggtcttaaggatgaatgtgaaggcaggatgactttataggaaacagaaaatgtctactaacatgctccagatattgacagtaaaatccagaggctggaggaaagctggttagccttggaaaaaccatcttttctttttcttttctttctcctttttcagaaataaggttaaactatccttaagaataagaaggaaaatattaaaacattcccccccaaaagttcatagatcttcaagaaaagagaagttaggaccaaaatataaacaggatgacaactgcttttatttgaagaaaatagagttttctagaagactgaatcagtatagcctgataaagtgcttatccattgggaaaagatattctatgggagcaaacaaataaagataaaagaggaagacattaaattaataatggctaaagaaggtgagagcctgaactcacttgctaaatgtgtctttaaagagggagccaacatgatctcacaagagtctctatgagaaggtgagaaggaaggttcttagtactcaagggcgaataggcaatctacaaatttcagaccaatgtttttatcccttgatgttcactgacaacacagacacagttccctgttttgaaaagaggtctaacaatcatgctgaacagtctgagacttaatagagccaatcagttcagtttctattagtgcacctgtacactcaggcatgcgttcaaccaaacacacatttagacactcagactactctaggtcttgggaaacaaagcagaatacaacagacatggcccctgctctcaggaggtgtaagcaccatgagaggagagaagcaataaacaatgaacaaatacatgtaaacgcaacagatctatattcgaacagttgctgcatggttctgatgggtctaattagcattttggcaaagaagaagcatgagaagggcatggattctgtgtcagacatttgaggggctggcttgtggaaatgacattatgtgtggtttaaagctacagggaagattttggttttaataaacttcctaacaatttctgtcactaaacattccacaggtgttttgtgctaagcactgttccaggtggctacattctggtaaaatgaggtagacagtaaacatgtatatgacactatgtaacatcacacgttgtaacccaaagcagcataatttggcataatgtaatataacatagtaaccattaaagctgtgcatcagtaaactggccatcaccatcagtgaaatggtgagctgcagctgggtgcggtggctcacgcctgtcatctcagcactttgggaggccgaggcgggcggatcacgaggtcaggagattgagaccacggtgaaaccccatctctactaaaaatacaaaaaattagctgggtgcggtggcaggcacctgtagtcccagctactcaggaggctgaggcaggagaatagcatgaacccgggaggcggagcttgcagtgagctgagattgcgccattgcactcctcgaggcatttgggatcacaagcagagtgggatgtctctgggaatccccagcctggagcagcttcctctgactttggtggagccacatgcagggctcagggcaacttctgctctctattcttaaccttccttaattgttgtgtctcaatattttcagtctcaattcctgactcaatgaagttcttaatttcatatgtgatccctggtgggtttgggacacatgatttcattttagtttttaattgaaaaagtatttattgaaaaagtatttccataatattttctgcttaaataacatatgcttctggttaaaaagttaaacattgcaaaaaaaatagcaaatgcaggagagtgaaaccccccaggatcctaacacctgcagataatgtcaatggtgaccagtgttaagcactgggtacttatctgatttttatatacatgcactaagatggggattatattaatatatgtatatttaatgaggtcatactgtttggtgatatactctttttcactgagcatctttcccaacacaacatacaaatgggtcttcttttttgcagttattattttggattggttcatcttaaaagtctttctacctaagaatagtttacacaccatagttacagtgttgcaatattctgtttttctgtgtacttactgttaccagtgagttttatgccttcagttgatttctggctcattaatgtctttttctttcagattaaatatctcccttcagcatttcttatacgacaggtctggtgttgaggaaattcctcagcttttgtttgtcttagaaagttttaatttcttcttcctgtttgaaggatattttcaccagatacactattctggggtaaaagttttttttcctttagcactttaaatatgtcacgccactctctcctggcctgcaaggtttccgctgaaaagtctgcggccagatgtactggagcaccatagtatgttacttgtttcttttctcttgttgcttttaggattttgtatctatccttgacctttgggagtttgattattaaatttcttgaggtagccttctttgggttaaatctccttggtggtctctaaccttcttgtccttggatattgatacctttctctaggttccgttattatacctttgaatacactttctccctatctatttctctctctgcctcctctttaaggccaacaattcttagacttgccctttagaggctattttctacatcttatacctgtgcctcactgttttttattctttttttcttttgtctttgccgatcatacattttcaaacagcctgtcttcaagctcactaattcattctcctgcttgatctgtttggctattaagagactctgatgcattcttcagtatgtcagctgcatttttcaactccagaatttctgcttgattctgtttaattatttcaatctctttgttaaatttatctgatagaattctgaattccttttctgtgttaccttgaatttctttgagtttcctcagaacagccattttgaattctctgtcacatacctctgtttctccagaattagtccctgacaccttatgccttatctagttcatttggtgaggctgttttcctggatgatgttgatgcttgcagatgtcaccggtgtttgggcactgaataattaggtccttattgtagtctttgcagtctgggcttgtttgtagctgtccttcttgggaaggctttccaggtatttgaaatgacttgggtgttgtgactgacactgtatctgcattagggggcaccccaagtccagtaacattgtagttcatgcagactcacagaagtactgccttggtggtctcggataagatcaggaagaattctctggaataccagacagaaactcttgttctcttcccttactttctcccaaacaaatggagtctctctttctccctgtgctgagcagcctggggctgggggtggggtgacataagcacccctgtggctaccacgactgggactgtgctgggtcacacctgaagccagcacaacactaagtcttacccaaggccactccctggctacagcctgtatttgctcaaggccctagggctctatgatcggcagacggtgaagccagctgggtttgtgtctttcccttcagggcagcgagttcccccagctgggtccagagatgctgtctaggagccagggactgaagataaaaaccttagaaatctacgtggccttctattccactctggctgagctggcactccaactgtaagccacagtccttcccatggtcccctctcctttccacaggcagaagagcctcatcccaaggccacgaccacgacaggcccacagggattactgccaggccactgccgatgttaacttaatgcccaaaggcccctcagtcaagtcgtggtgagtgctgcctggcctgggactcacccttcagggcagtagactcccctctggcccagggaaggcccagagatggtatccaacagccaaggcctggaatcagggacaccaagagcctgcttagtgctctaccctgctgtggccaagctggtacctaaggtgcaagaccaagtcccttttacttttccttctgcttttctaagcagaaggagtctctcactatagccaccacagttgggaatgtggtgggtctcacctgcagccagcagtctcagagtctcaccaaggcccatggcatatgacctgggtatcactgctggttattcagggaccaagggctctttaagtcagcaagagatggatcttgccaggacttggtccttcccttcaaggcagtgtctccttctggcccagggtgtctctctagaaatgttttctgagaggtacggcctgaaaatggggcctcacagctctgactggtaccctatccctctgtggctgagctgataaccaagatgcaagacaaagtcctctttactcttgcccctcctgtccttaagcagaaggaaggggtctcttttgaagctgggagctttgttgcctgggtttggaggaggggtagtgtaagcactccctattcacaatagcaaagacatgagatcaacccaaaggaccatcagtggtagactggataaagaaaatgtgtacatatataccacagaatactacgcaaccataaaaaggaacaagatcacgtcctttgcaggagcatggatggaactggaagctgttctcctcagcaaactaatgcaggaacagaaaaccaaacactgcatgttttcacttataagtgggagttgaacaatgagaacacatggacacatggatggtggggaaaaacacatactgaggcctgccatgggggatcatcaggaagaacagctaatggatactgggcttaatatctgggtgatgagttgatctgtgcagcaaaccaccgaggtacacgttacctatgtaataagcctgcatatcctgcatatgtatcccagaacttaaaaaatgaagaagaaaaaaaaaaaaaaaccagagcaattcacactcaacagcatgccagggaagatgtctcagccctggtgtcctgacaagagcagtttctgaataggaagaaggctggcacaaatggatacagcaacacattctagagatgcaaagttccaacaaaagcattttaaaggtcaccttgtttatataatatttatgttttaagaccttatgattcccccaatatttcaaagctctcagagacaaaagaataacatggtataaagaagtggaactcggaatgaggagacgtggactctggtttcagagccacaggaaactgtggaatctggaggtgaagacaaccccaggaagtgacgtatttctaaattttctgatgaggacacccggccccaagaagttctgtgagctgcccaaggcctctcagtcacttgtgatacagccagaatgcagggcaggggccactgtgtccttctatgttccttcagtctgcaaaacagcgataagaatagctaattggggttttctgagaagttactgtattggaaaccataaatatgtcatttaatgaagaacaatgagcttcggcaggatttcttaagtgtgaatgcaatcgacatgcggtattcctgccttcttggttctctcgtctcatactcaactctggtcccctttcccatcctccacctcagaaaacaagaagtgggacaaaataggaaaggagagaagaggaagaataaacaagaagtgggacaaaatagggaaggagagaagaggaagaaaagagtgacgatgagccccgggcgaggtggcaggggcctgagaggcagggaaggcaaatggggagctttgttctgaccaggccgtgtgcttggtctgtggggcctctggcttcccatgggtgagtcctgtgagaagaactgtgatagtctaagtgtctgccaaaagaagggagtgaattagatgcaacccattccaccctgcctcaggaacaatgtacacacaaatacatgtcaggattctctctgaactttacacagaaattgcctggctatgttcagctcttctcagggagagaaacagaaagtatttgctctggaaatcttgtatcaatatataaccaagatcttaatgttttcagacttgccccttcctttttctagcatttgttttttcttctgtatctcctcaggaagatatggtggcaattaaaagaaaaattattctgaacagcctgaagtgatatggctaagcctagcaccacttttatttcagagttaaacaaccatgacttaattctcaaattgcttcccaaccctgggaagttaaggtcctagtctccggctaattctagaaccatctatcattaaatgaagttgaacacaaagaaggggcgactgcagctaagggaaaggccgtcaatcctgacaccagattaatcttccccaaatgcctttcctgcctgagagggtttgtggctgcttgttagactagatccaagttctcagccttgtctcaggcctgcctggccattgagtgtctcacatgcttcccaccattcctcatgggagcctgggttcagaccggccaggttcccactcccgttcacaggaaggaggctctgcgactttcacctgcaggctctgctcacccgttgtcacttccccatccacatcctacccttctatcacatcttccttcaagaagactcacactgttcaggaaacacctgctcactgcctccttaagttcctttctctaaatgtctacagtgttaatagtttatagcactcagcccactgattgagaccacagctaagtttctgagggcagagaccccctctgtttagttcactgctccttccccagtgtcaagcttagccaggtgctcattaaagaattacaaaatgagcaaatggttacttgactcgtgaggtaggataagacaatgagactgattcttaaactacttgctgtaatataaactcatataattttttttgttgctacaaagctgtcatctaggcaggtgagtcttttattactaaaatgcttggagtgctcaaacgttttgggaattcttctttggaaactgtgctacgtcaattcctggggttggggttgaggtggtgggggtggaggttggtgtgatgggggtggggaatctcagagttaagactggatatgaattaacaaagagacaaaagtcactcagggccaagccttaactgaagtggctgattaagctagtgagagcagttctggatcaaaactgatcaaaagtcagtcctattcaacatagtattggaagttctggccagggcaatcaggcaagagaaagaattaaagggtattcaaataggaaaagaggaagtcaaattatctttgtttgcagatgacatgatcctatatctagaaaaccccatcgtctcagcccaaaagcttcttaagctgataagcaatttcagcaaagtctcagcatataaaatcaatgtgcagaaatcacaaggattcctatacaccaacaacaggcaagctgagaaccaaatcatgaaagaattcccattcccattcacaactgccacaaagagaataaaatacctaggaatatagctaacaggggaagtgaaggacctcttcaagaagaactacaaaccactgttcaaagaaatcagagatgacacaaacaaatggaaaaacattccatgctcatgcacaggaagaatcgatatcatgaaaatggccacactgcccaaagcaatttatagattcaatgctattcccattaaactaccattgacattcttcacagaattagaaaaaactattttaaaattcatatggaaccaaaaaagagcccaaatagccaaggcaatcctaatcctaagcaaaaagaataaagctggaggcatcacactgcccaactttaaactataatacaagactacagtaaccaaaacagcatggtactggtacaagaacagacatacagaccaatggaacagaatagagaacccagaaataagaccacacacccacaatcatctgatctttgacaaacctgacaaaaacaagcaacggagaaaggattccctatttaataaattgtgctgagagaactgactagcgatatgcagaaaactgaaactggaccccttccttacaccatatacaaaaaatcaactcaagatggattaaagacttaaatgcaaaacccaaaactaaaaaagctctagaaaaaaacctaagcaataccattcaggacataggcatgagcaaaaatttcatgacaaagatgccaaaagcaattgcaacaaaagcaaaaattgacaaacgggatctaattaaactaaaaagcttctgtacagcaaaagaaactaccaacagagtaaacagacaacctacagaatgggagaaaatttttgcaatctatgcctctgacaaaggtttaacatccagcatctataaagaacttaaacaaatttacaagaaaaaaaataaaccgctccatgaaaaagtaggcaaaggacatgaacagacacttctcaaaagacatacatgcagccaacaaacacatgaaaaaagctcaacatcattgatcattagagaaatgcaaatcaaaaccacaatgagatatcatctcacgtcagtcagaatggctattattaaaaaatcaaaaaacaacatgctggcaatgtcgtggagaagaaggaatgcttttatactgttggtgggagtgtaaattcaaccatcgtggaagacagtgtggcaattcctcaaagacctagaagcagaaacaccatttgacccagcaatcccattactgggtattacccaaaggaatagaaattgttctattgtagtgctattagcaatagaaaagacatgggatcaacctaaatgcccatcaatgatagactgaataaagaaaatgtggtacatatacaccatggaatactatgcagccatacaaaagaatgagatcatgtcctttgtagggacctggatggagctggaggcctttatccttagcaaactaacacaggaacagaaaaccaaatactgcatgttctcacttataagtgggagctaaatgatgagaacacatggacacatgtgtgggaaagacacacagtggggcctgtcagagggcaggaggaggtaggaggagggaaaaatcagggtgatgggctgataggtgcagcaaaccaccatggcacacatttaactatgtagcaaactcgcacatcctgcacatataccccagaacttaaaataaaagttggaaaaaaaaaaacccaagtcaggatgccattcctcatggctcatcctcgctctcaagaagaaagccattataggaattcctgaaagacgacaacatcattagaatgagtatttagattctcaagatgactatttcaaaggacagtagttccttgcatgcactaaaaataccccgaaacatgaatacttcttttttaaaatgaatctagcaactagcacacagaaggaaacaagtcaatacccactgacctagttgtggtagaacactagtttagttctgggcaaatataaactttaaaataaacccgatgctttaaaaataccaagcttctacagtagaacgataaaataatacaacagtaggagacatgtgaaaatgcatgactatctctcaggaggaaacaaagtgtggggaacttttaaaatacaactctcaaaggggtttcaaatggcatcgggggaaaaaaggaatgcacttgatgttcctggagttccttataattgtgtctctttggctcctaacaaagaaccagcagcagagtcaaaattattttgggcaaatttcaagaaattaaaacaaaggtttaaaaaatcacagaagagtaggggtcagtttgtttacctagcacagacagatggttgtatttctgtagttagaggagcaatgcagaaagacttccaaagttccagatgaggcacatttgccaagaaaatgcttcaggttggcagaaggtagaaaccctgtattggctaaatatttagcaacactgaagaatttttaacactaatatctcatttggagtggaatatgctttatggtctgaattctttccccactctgttttataagtgatgataaaaatcaaaacataatcacctgtcgaggatgaatcctgcacctgtgaaattatatttcaaacaagccaacttcctaattacaatggagagggaactggcatgaggaagcaagttatttccaccattccggcagtgggctccaggctcccagatgaagagctgttggtacaaccacaaaaaaactgctaaaatcatcttttattattcctgtctgcacaacaaatagctccatctggggctcaatggtagactccagccaaaatttgtaagggctcggctctgaggcatctgatagcagccctgcataaggcagaaaatcagaccaccatcagcaccaggatcactgtctacatgagttgatgaagagtttgtggggggcactgggccgagcatgtcaaggggcacagaaaattggaagcatggaccctgctttaaagaagcttacagggcagttggggagataggaatctacaaacacacatatgctaaagcacaacagtccctcagttatgtgtggcaaattccaaatgagggacaggcggtgatgcttggaattgagcaaagtcagagcccgctgtgagtggcagtagccagtgccacacaaagcaggcagggtgtgagcatcttctgagaacttcctacatgtaagtctccacgctgagttcctacccaggtcctctcatttacctgattccttcccaggagcatcctgggagagtgccactaggagaccacagttcttcctgcacagaggaaaccttccatttctccacaacgtttgcttgatcctacttgactccaggcccttcctgctgggctttaagccagttgataccacagtggctggcgcaactctgaagtgtgcatgttcagagtcctgagtccctagaccctgggcatctgcagactgaatgctgctgcatcccagggctcagatgctgagtcatggggagtggtctttgggcttttctcaaaggagtacaccgcactggatatttatgtccttagttgggttgggttaagcattcccatctgcgtgccctggtaagcttctccaatagatgttatgtacaaggctcttcattcataactctttcaaatatctcaggtaaggattgctagctcttcgcctccaacatctggcaggctttctacctggttcctttgctttctgcctctatgaaaatgctctgaagtgctggtcttggccaggcaagctacctgtaggccatgtcttcatgcacacagacaagttggctgccttctaccagctcccggtggtcccacagagcagatgcgccacaggctgtgtcctgtacaccctggccctgggagcgcaggctcagtttgcacagcattactgaagcagaccctggggtacttaaaaaaagcaaaagcaaaaaaaaaaaaaaaaaaaaaaaacaaaatgcaaaaattagttccagcactatcagttcaaatgggcaatgtgcatgtccatatggctgggctcctccaggtctgactgtgcaataaagacaggtttcagttggtttgttccaggcctgagagccagaaggcagagcagtctctgaagcactgaagccagagtgacccctgcacatcgcatcccttctggatcctgcctggagctctgtctgcccggaacacccttctcctcctccttcctctggtctcctcctccttctccttctcatctcttatctccttcaggtctgtggctttccccagcagtttacacagtacctggcactaggtgaagctcaaaaatatttgttcaaaacatgaagtaatgtacaattgatacaaggaagggatgacacaaggtgcctcagacaggcagaaacagaggggattaacagcacgcatagaaagcaatagatgtattcatgcataagcacaccagcaggatgccacccaactcccaccataactggctgggacaatgcttggtagcctgtctctccccactcccatctctagatgctctttcatgtgaatatcaatgtgatctatgtcatcggtctgccaatctatcttaacaatattaagtcttcctatccatgagcacagaacatttttctacttttttaagttttaatttctttcaacaatgttttatagtgttcagtgtacaagtattgcactttcttggttaactttattgctaagtgttttattctttggatgctattgtaaatgaaatttccttaatttcatttttttgattgctcattgctagtgtatagacacaaaactgatttttgtatattgatcttatattctgcaactttgccaaacttgtttattacctataattttgtgtgtgtgtgtgtgtgtgtgtgcgcgtgtgtgtgtgtgtgtgtgtgtgtgtgtgtgtgtggcggggttggctctttagggttttctatatggaagataatgttatctgtgaattagagatagttttacttcttcctaatttggatgccttttcttttcttgcctaattgctctggctagtacttctaggataatactgactggaagtagtgagcagacacccttgtctagctcccgatcttagggggaaagcatctgctcttttatcattaagcatgatgttagctgtgggttttccatgggtatctgttctagctggaggagggctgcctctgttcctggtttgttgggtgtttttatcatggatggttgttgggattttgtcaaatgctttttctgtatctattgagatggccatgtggctgttatcatttatttatagttagagtatgttatattaatttcaatatataaaatcaactttgaattcttggcataaatccctaagaaataaattcttaaaacaacagcaagatgataaatatgctcataatattacatagcagtgtggtgtttcacatttttcagggaattttcacaaacaaaaaaccctgggtaagtgaccacacagtcacagttattattcttattagtcagttacgtatttttgtgtatttagagggtacaagtccaggtttcttacatgcatatactgcgtagtggtgaagtctgggcatttagtgaccccatcacccgaagcgtaaacactgtacccagtagatagtttttcagccttcactcccctcccacctttcacggtctattattccactttgtatgtccatgtgtacccattgattagcttccacttgtaaatgagaacatgtggtatttgattttctgtttctgagcacacagttattattattagtcttcattttacaaggaaagaaacaaaagctcagaaacttctccaaggatacaacattggcaaatggcagagccacgacctggattcaggtcttctcatttgtggtctaaatagtcacatgcacggagagagtgttacagttatactgaaaagatagccgcacatcattataagaaaagataaagaacacatctcattcaaaactagaatcccagcatctgaaggactactgaagtgtctaatgagcatgtgttcataatccttttctatgggttgttctgatcactgtaggaggagcaggacttatctcccatctccaaacactctcccttgacctcacagcagactagagcaactatcccatttctctgctcctctttatagcaaaactctccatctaaactccctgtcctgattccagtctgtgcttcaagctgacgctggtctggcattcctggggctgattctcagtttcccgcctactgaacctctcagcgctctgtctgagtaaataattctctcctagatggatcactttcctcctggccatcaaaacatctactcttagcttctccttcccaggttcctttgtaagatccttctcaccttcctgatttttatatgactgtgcaacccagggtttggctctacaatcacttcccttttccagatatacttatgttctggatgatctcatcctggccacgtttaccctgccaaactacacctttcgcctgaatgccaaacttgtgcatctaactgcttcccagctacctccactctgatatctgaatagaaccctaagtgtacacatttaaaactcaactctcgagttccaccacaaacctgctttttccattgtcttccccatcttagtgaatggcaacttcattcttccatttgttcagatccaaaccctggactcatcttgacttctctctttctttcaccctgagcatgccatatattactgaatcctgatagcccaaccctcaaaatgtatcctggatctagtcacctgcgacctccaaggctgcccaccttagtatacaacactgtcatctctcatttgacttttcctgaggtctcttgcttccacccttgttccctgacaagcctcttctccctatagcagccagagggatcatttaaaacacaaaacagatcatgtcagtcttctgctgaaaaacttccagtggcttcttatcttatggagaatgaaacccaaggttcttggatctggccctggttccctccatgactcagtactcatcattctccccttacttactctactttagttacaatgattttctccaaacaaaccaaacaggttcctgcctcaggacctttgcacctactgttcccttggcctgtccacccttctccatgtcagcaatgccactccctcccttacttgatagatctctgctcaaccacgacttcagcagagagggcttccccgtctgccctatcttaaataacaccagcccagtcattctctattccctcaccttgccttatttttcttcttagcacttatcactgcctaccatttatatatttattggtttatctgtttattatctccccttgctaacatgtaaacatcatgagaataggaaaccttctctgtttgttcattgctatatcttagggctgggtcagcaaaacaatggctgccaggccaaactggcctgccacattattttaaacgatgttttactggaacacagccacaccacttcactcactgctgttatccatgggtgcttctgtgctacagaagcataattgagttgtcacatcagagactggatggccctcaaagcctaaaatgttgaccatttggtcctttccagaaaacgtttgctggctcgttttggggtctagaagacaatgctggcacacagtagaggcaccaaacacatttgctcgatgaataaatgaatgaatgaatgaaataaaagaagaaaccaagaagcggattaagaaatattataccaaaagggcatttgcatttgttaccagattaaccaagtatagcaaaatattagaaagagtgatttaaacttaacagaaatccaaataaagaaaaaaaaaatcttataattctgttttctataaattaagaattatatgaggtgagggaaatgctggggtgaatactgctagcctgtgtgacattcaagcttatacagaactttattatctgggggacttcagttcaaataaatgaacccacacacactaaaaacgatcgcttcagaaacctgaaagggttttttctttttcttctttacagatcttctttacattcaggccaatgttttgattttccatttccccttgggcatgaagacagttttcttttggagttggggtccccacattgtaataactgttaacagagtgcacctgaaaggcttaaaggtagaccctaccaaaagccctttggcccaaacatctgtaaatgctagtgaacattatcagataaagaagcaggattccctttttatgtttttaaggtaccaattctgccagcatgagagagagtagaaggaacagaactcaaaaagtacaaggtcagagttaaaattttaaaagatggtacaaagtccccagtgaacagttgcaggacacactgcctgagctgtgctgccgccataggaagaggggcctgccatagtcctgcaaagcttttccgcggcaatccatctgaaactgctcctgaaactttgtcaactttgacctgcaacactggttctcaagaaagccagtcaacaagcatttgctcaagtccttctatgctttactttgagtttaacatcaaaggctcaggcctctcttctgatatttgaccactttgactggtaattaggtttgtggatgaacaaacacctccatctcaacacacgtacaaatgcagtgttcatggcaaactcagagacaagacttctgcaggtaacattagtgttctaaaacccacaacaacacacaaagtattttaaactaatggcatttagaaatccagaagcaaaaaagacacaaattcttattttggcacatgagtgtgtagaggatctgttttctcaagcacaaatattttccaaacaaatagttttaaacatccaaaaagtctgtctttccttgctgttttagaaaagttcctagggcttctgagaattttatgagagattaaagacagtcaatggctgcttggtacctggcgcccaggctggacttatcttttcttcgcatatctttggcagaggatagcggtagataaaatccattattgacagaaggaaaacagacaatgagcagagaagtaaatgagaaagcttcattatttacccaactttgaaatggtaataaagcttttgctctatcccaaagtttgacaattgccatgcactgccaacccctacctctcaagtcccctttaatatcctcctccaaacttgaggggttccaactgtggagattctgaaaagctgttgcacaccacctcctcttctagagcctgcctatcccaaggggctgacgcactgtcagtgtctggggacgctgggtagacaatgcaaacgagagggtgtaaatgtaaattctgcatttgggtaccagtggctgtgctgcagtgtgagggaactcatccatctcaggaactctggcctctctcacgagagaagaaagatgccctgtgagagcagaggaatacacggcacaggaggattcacttctgcctcacactgtcctaaggactaagccatgctggccactgacgaaatacgtgttcttttattaaccaaacaacatctttgctcaaatcatctgtagcaaatcatttagcctgactgcttttctggaatccagagctgtctttctaaaatttgtgatgtggaagctgtcatttgcagaaacttccagaaaaagaaagaatggtcaggagaccatactgaaggtatatatccagccacttttctaaaatattttattcttgctgtggtacatgacagggcccccctggaaagggaaagtgattcaagagggtctcctatacctgacttgagcggtaaatcaacaaaccctttcagcacctactatgtgctaaacatagatattgtatttcatcaattatatattgcccgttgcaagtactttttgaagctgcattaactctctttgatcaaaaacttactttttaagcacatccaagtgtttctgaaaagtattcaaagaaaacactaaggtaacctctgcagatgccttgccgagaggccagtctgcattccccttgccagtggctctagcataagtgattagcaggggggttaagacccaaagcccctcagggaatctggatacagcatctgtcaatcagaaccaagcccagatagcccagttaccagaactttgtcctcttggatagtttcccatctagaaacaagatttgggtgagtctccacaagtctgccgttttcagcaccctcgtggatggtctggaggcattctttgggttgttgcggagcatgtgtgtatatttcagtgtagtagtatcctgccaaacctctgcaggctctaaatatgatagagcacggtagtctcgcaaagggaatgtgctgcacagcacagaaaggagatgaaaggtacaaggccttggagttagtccctctagaggcctgaaacaagcccagagcaaagggtgaccggatggcaaataaaagtgcacagctcagtaaattatgcaagttcacattacatgctagtatgatattggaacggcataaagctttgcgcagtattaagacattctgtttctcaactttaaaatcttaggctatcggcatttgagagaagaagctctatcaggcatttcgctgcaagagcaattttattctactgaataatgtggacttactttctcttagccactttttattttaggatatgaagtattaataggtatataccaaatgtaactgtattgtcctatcattcagtccatacctttcaggtgatctctataggctgatcttgaggtgagtacattttaagttattagagtttaaaaactcatgataacctgatcaggaggttgtgttcagcttcctctttgcaaatatgtctttgctaccgtggctggcgtgttccctcactccttaactccagctctgcaattatcctgacttgtttttaaaccattgcatgttgctgagtgtttgcatacagcagcgatgttgcgccctctgaggttttagtcacttatcctcatttatatccctgcttgtgtcccggtagccaggagagaatgcagatgtggaaagagcaggagagtgagttccagttactgcaggtcagcctgaattggcttgtctgttcttaatcgaactctggcaaagccactccaggttctaatctatgtggacctctataacagaaagcaagtgaaatcgagaattacagtcatgcagtccacgacaaatgaaaatctatgttactaccttagtgccacactcacattaaacggccatttccaaatttaaagtaatagcacagaagtggcttctacctgcctttataaggacagcgctagttcgaaaattatatccaaatctccaaaaattacctgtaaaggttacaactaccagagacaggaagattagcttagaaataataaaactttactctctccttattcctcttctctttttacaatgcaatctcatcacaggttctacatgaacaataaaagggggacatttttatttccccttagatttcttttacttaaaagttctaaaaactgttgtagataacaggcttttctgctgtctccttccagtgaatatgtggaagagtttagaactcttcagaaaacttcctacttttcacatacactcaagaaattctgagagtttgaatcagcatgaacctttaagtgatttttttatttttatttttagacagagtcacgccctgtcacccaggctggagtgcaatggcgcaatctcagctcactgcaacctcagcctcccgggttcaagcgattctgctgcctcagcctcccgggtagctgggattacaggcacgtgtcaccatgcctggctaattttttgtatttttagtacagatggggtttcaccatgttggccaggctggtctcgaactcttgacctcaagtgatctgcctgccttgacctcccaaagtgctttaagtgatttaagaagaacttgagttcacttagtgcctgtgccccattgacatagtctctgcctgatgccccatggccattcgttgagtgcggactctcaaatcttgcacaattacgggtgctttctgcaaaaggatggtagggagatgaagggtttgggctttttattctgactgccatttcttctctgtactcttgggaatgttgtttaatccctcaggctcagtttcctcatctgtaaatggggactggagattgataacggtatttgactcatgaggccaatgtgaggctccatgagatattggcactaaagccaccatcagtccgcacacactagctcagtgtacatccgttaatgtcagttgtggctattgcaatgattaaagattaacacggccataaagcgaaaggtagaatattgaatgttcagataaaataaagttcacctttaaaacaacagatgtttaaaaaaatcaagattttccaccttttacttcttgatcttacatggtaataatgcaagtatgacagcgcaatgcagtaagcgtaaggttgataattgtggctctgcccagaaatcaggggtgtgggggccagtaaatagaacagatactgaaaaacatttgtgggttttatgccgtagtgctataaagttgcatagtaaaaaaaaaataaactataacttcaaactaatccttttatgccagcatgctgtaaaatatttagaggattcgggctggctttagtgatggattcaatgtgccgtggagttttgtcctttcccaaactttagctgcaatggctgaattcccaccacaccatctgttcctgacacttggtctcattagtacgagtatttttattgatacacacagtaatgcttctcataccatcttagctaagcattatttattgtatctatatatacaacaatattaacacagtcaagcaccaggatcggtacttgagggcatcattaaaatcagccagtgttcagtgagagacttaatgatggatttaatagtattaaatgggcaaaaatgcccttggcctttacatgctcatttaaaaacatataaaagagcagtaattcaggcagttatacttctctcaaagattttgctctaaatcacagatggcagcgggaggccacggctgtgtgctggctcacaccccactcactccaaccgaagccagaagtgctcgttgggtcataattagcaaaccacccgcaaactcgactctttaaatcagaggccagtgactgccaggctggggcatagacgggagaaaacaagcagaaatggtcaaggtgctctctggagcctgccttcggatagctgtgacccccacgttaggcatcaagacagggttccacacctgcgccgccacccctgcagtgtgagcgctgtattttgctttctgagaaagcctcacggtttggctctttggtgcatgaggctttaaggcgatgtgccccctgcccagctgttgcccagctcccagcccttgccacagacagcatacatctctgttttagaaacaaatcatttagtcacttaatcatgaattcccgatgatgtacgtcctgcagaggtctgagctggggctgctggtctgaaagtctacgtacttctgactggagacttaggctaggctgggtttcaaatttggatgaagacggttttggctgagcagggagaagaaaacaaacaaacgaacaaacaaacaaacaaacaacaatccgggagcctggagtttgctgagaggctcagctttggggagatctggggctggccatccttggagtctgcttccttatcagcaaacgcctcctaaagttgttatgatacttctcagaactagacagcatatatgaaatcagataatgcacagttgtgcactacttggtgacattttggttaatgacagactgcatatatgagggcagtcctgtaagattataatggagctgacgtcctatcacctagtgatgcaatagccattgtaatgtcacagtgtaacacattactcaccattgtggtgatgctggcgtaaataaacctaatgcgatgccagtcatataaaagtatggcacatacaaaattatgtacagtacatactatttcataatgataataaacaatgatgtcacaggtttatgtatttactacattacactatacttttattattttagagtgcactccttctactcattaaaaaaaagttaactgtaaaacagcttcaagcagttcctcatgaggtatccagaagaaggcactgctatcagaggagaggacagctccacgcatgttaccacccctgaagacctcccagtgggacaagatgtggaggtggagggctgtgatgtcgatgatcctgaccctgtgcaggcctacactaatgtgctgtgcctttgattttagcccaaaaaaattaaaaagaaaagcatttttaatgaaaaaagcttacagaataaggatgtaaagaaactatttttgaatagtcgtacagtgttgtttgtgcttaaactaagtgttattacaaaagagtcaaaaattacacaactttaaaaatgtataaagtaaaaaggttacagtaagaataggctaaggttaatttattactgaagaaacagaagttttttaaaaataaatttagtatagtctaagttcacagtgtacagtagtgtacgataatgtcctaggccttcacattcactcagcactcactcactgactcacccagagcaacttccagtcctgtaagctcctttcgtggtaagggtcctatgcaagtatactatttttaaaaaatcttttatgctgtatttttactctaccttttctgtgtttagatacatatatagttatcattgtggcacgattgcctatagcattcagtatagtagcatgctgtgcaggtttctggcctaggagcaacagaccataccatatagcttgagtgtatagtaggctataccatcttagtttgtgaagtgtgatgttcacaaaacaatgaaatggcctaacgacacatttctcagaacatatccatattgttataccatgcatgactgcatatgaaatgcttcatacaaagcttggcattcataattttaataagttgttggccaggtgcggtgccatgcctgtaattccaactctttgggaggccaagttgggaggactgcttgaggccaggagctcgagaccatcctgggcaacacagtgagacctgtctctacaaaaaattatctgggcatggcagtgcatgtagctgggcaaggtggtacatgcctgtagtcaaagctacttgggaggctggggcgggaggattgcttgagttcaagagttcgaggctgcagtgagctaactatgccactgcacttcagactaggtaacagagtgaggccctgtcaccaaaaaaaaaaaaaaaaaaaaaaaagtagttgaggattcaggccactggttctgccttcttttccagacaccctagaaatcatgaaaatggaaccagaatgacagtatggctgccctctcccagaacttccaccaggcctctctgcatcccccctgggattaacctgcatggatggcagcccagcctcttcctgcctctggcctcaggagagactttcattttggaactgctgacaatcacatcaagaacaggtcatgtcaggagaggctgggaatgatattgctcgaggattcggaggctgcttccatgggaagttacagacctaactgagtccttctcacacttcttaaaggctttcaggaaaaataaacatcagtggcataagcgcaagctctgcaaattaaaagatggctacaaaatgatcttctttgcattttaagcaaattacagaatcattcaactaatttcaacaatgaaaggaatgtagatccagtgaaaattacacatgcatggaccctggtgatgatacctaaaattagattgttgatggcagctcctgcaaaaataaatgcaaagtgattgctcatcagaaaatacatactgagttcccatgtgaaactcctgcctgtgataaattcttccaacgaaatgactactcaagcatttaccaacctgccttagaaaatagtgcaagctaatgtttcttgtccaaaaatgtgtatacagcacagataagaaaagaaatgtgacagtaacagcagagtcttgaactggctgaaaagcccatacagtaagtgctataaggacatcaactaggaactgggctaacgtggtaactagtgtctgacagcagcacccacagcaagacaactcaaaatttattaataaaactaccacaggctttcaacatctacatacaatgggcctaaggctttgtaatctttgaatgaaatacactacagagaacctcctagtgaatgaatgaaagatctaagattttcttctctttgcaaaggaaccctgagctgtattcatgcatttgaggataagatgtttcctttatggaggagtttgcttttacaattttattatcaatatccattaagtagcaactgaattttatagcaggtttcaaacaggggcaatgtctggagatatgtttggttgtcataacagagtgggtgctactggcatcaagtgggtagatgccaggggtactgctaaacatcctacagtgcataggagagtcccacaaccaaaaattatctggcctaaaatgtccatagtcctaaggcaaagaaaccctgataaatatacaacaatctacaactctgataaatgtacggtgattgtactctgggtatttactcaagataaatgacaacacacgtccacacaaaaacttgcacacggcatagctttatgtacaacaacccaaaccgaaaactcgaaatatccatggcaaataaacaatggataaagaaattatgatatacccatagaatggaacgcttctcagcaacagaaagaacgaagcgagtacacaaaacatgagtaaatctcaaaaacagtttggtaagtaaaagaaaccaggcacaaagagtatattccatctttttctagacaggtgatgttctagaactggccatgccgaactaggctatacagaccacaggcacttcagtgatcatgttggcctggggataggagagtaagggttgaggttcctcttctttttctttattcaagatggaaatgtgttgaaaattagttggtaacatacagttgtccctcgctacccttggcggattggttctaggacccctgtggataccaaaatctacggatgcttatataaaatgatatacaatggtgtgtttccatgtaattctcctatgtactttaataaataatccctaggttacttacaacacctaatgtcatgtaaataccatgtagatacttgctttattgcactgttcggggaataatgacaagaaagatagtctgtgcctgttcagtacggatgcaccattctttccctggcgcctgaacgtttttgatctgcggttcatttaacctgtgaatgtggaacccacaaatacagagagccgactgtacagtcaaccttcattattcacggattctttatttctgaatttgccccctcattaaatttactgatgccccaaatttcatactcacagtgctttcctggtcattcatggacacgcacagaatggtgaaaaccatgactggcccaatgtgcatgtttccagacaaggctgaaaaaggtgacacgctgtcttcttgtttcagctttcctactgtcctttttgtggtatatttagtgccatattttttgcaattttgtgtttttcttttttttttttttaattttgctgtttaaaatggaccccaggcatcgtgctcagtgctgtctagtgatcccaagtgcaaaaaagttgtgatgtcccttatggaggaaataagtgcatcagatatgcttcatttgggcatgggttatagtgctgttagctgtgagttcagtgttagtgaatcaacaatatatgttaaataaggtgtctttaaacagaaacacacatacaacaaggttatatactgattggctgatgtgtgatcgaaggctcacagcaacttaactttgcattttccctaggttcagtatttgctaattcagtatgactctgtaaaacataataccatgaataatgagaatggacagcatatgtgagtctttttctagacactattacacagaactctgggactgaggctagaggatcactcgaagccaggagttcaagaccagcctgggtaagaagactctgcctctacaaaatataaaaaaattagctgggcgcactagcagtgcatgtgtgtagtcccagctacttggaaggctgaggtgggaggatctcctgagcccaggagattgaggttacagtgagccgtgattgagctgctgcactccaacctgcctgagtgacagagtgagactctgtcttaaaaaacaaaacaaaacaaaaacaaacaaaacaacaaaaactcaaacaaaatgaaattggcaagagtatatctttgccttagcatcttcggagcaaagcaatttgttcctttatcattagttaagctactataggctttttgtggataccctttatcaagctgaggaagtttccatatattcctagtttgttcagagttaaatatatcttaaattttgccaaatgctttttctgcaccgattgaaatattcatataattttatcctttattctgctaatacagaaaattatactgactgatttttgtacgttaaaccttcttggcattcctggaatactttacttattatatatttctgaatttaactagctaagttttgtgaaaggttgatatcagactaatgttagcctcatgaaaaatatatctgggacatgtttcctcctcatttgttttctgagtaattttgtacatggttaatatttcttcctcaaccggtaacatctgagtgacaccatctgatcacggtgatatggtttggatatttgtccccttcaaatctcatgttgaaatgcgatgacccctggtgttggaggtggggcctattgagaggtatttgggtcatgaaggtggatctctcatgaatggcctggtgccctccccatggtaatgggtgagtttctagctctattagttcccgcaagaactggatgttaaaaaaagaaccatggcacttcctttttctccagctccctctcaatgtgacacgcctgctcccctttcgccttccatcctgactataagcttcgtgaggcctcgccagaagcgaatgctagcactgtccttcttaaacagcctgcagaaccccgagcccaaacaaacatcttttctttgtaaatttcccagtctcaggcattcctttacagcaacacaaaacagactaacacacatggaatttgggggaattacaaattcaatttcattaacacagataggactacacagattctattttttggggtagatttggtcatttttatctttaaataaatttgtacatttcccctaagctgttgaatctattggcataaagttgttaacagcagccctttatttattcttctaatgtttgtaatacctgtggtgatgtcctctctttcattgctcatattaatcattcgcgttttctcttttctgttgtttagcccacttagaactttattaattttattgatcttttcaaaggagcagctttagatttcataaattttcagtatctttgtccattttctatttttaatgagttctgctcctatctttattatttcttccttctacttcctttgggtttaatttactctttgtacttgagattcttaaggtggaaactcaaggaacctgacgttcaacctttcttctttttctgttatgaacatttaaagctataagatttccttgaagaactgctctaactacattttacatacacatcttcattagggtcaatatttgttctaatttctctgatgatttcttctttgacacatggatttagaaatatgttgtttcatttccccatattgggggattttccagatatctcttttatttctaaattaattttgttttggccagaaaacatattctgtatttcagtccttctaatttattgagattggttttatacccagaacatggtctattttccttttgctatgggtcacatttgctgcttctttttcttacaattttggaatggatgcttaacattttggatgttggtaaatgtttttcttttctttcttcagagactgatgaagtttgttttgtcgagaaattaggttacttgtgtatcaaagcttatttttaaattgtgttagggtgtagccaatccctttattctagagatactttagctgtattactaagacatagctagtatctctacttaatgctctgggttgttaacagggtctttccattaaggcttgtgagaatttaaatgtatctttgctgtatgtgagttctggggattgttcatctagtagctccatggcaatttttatttgcatagccttgtggaatttcatattatgcatgcaaggattagtattcagctaaagactcaaggggtcccctatgtagatttctggaactcttcctctgagtatctccactttagtattctgtcttgcaaactccagctgcctaggccttttcatagtctattttccctcaactcagtgagacttctagttctgtttaaagctctgtctcttcactacagtctagaaagcagctctgaatataaatctgagatgactacagtagtcacctaatttatttcccttcatgggatcatgattctgtactgactgttttccaatgtctgaaaacagtgatttcatatattttgggtagttttctagttgtttatggcaggagggcaaattctataccatttattacttcataagaagaactagagtaatcactcaaaagtacgaacctgatgatatcactctccagcttaaaacccttccatgctgactatataatttgctgtctatactggtatatttctgaagtgctaaaatgctaaccagaagaagtgctggtgattcacaatagcaatgatatggaatcaacctaagtgcccatcaatggatgattggacagagaaaaagtagtgtgcatataaacacacacacacacaccatggaacactactcagccatgaaaaagaatgaaatcatgtcttttgcagcaacatccctggctgcactggaggccattatcttaagtgaaacaatacagaaagtcaaatactgatagtctcacttataagtgggaactaaataatgtgcacacatggacacagtatgtggaatgacagacactggggactcagaagggcaatggctggggggcaggtgggagggcagtgagggatgcgaaattactaatgggcataatctacattattcagatggtggatacactaaacgcccagattttaccactacacaatatactcccataacaaaacagcacttgtagtccttaaatttatccaagaaaaaggtgtggggataatgagcataaaccaggatgatcacaggaaaactagcacttctgtcactgctaaactcctcggctcggcttctaggctctcattacttcccctcctcatttccctcccaccttcattcctttagcttgaatgcctctacagtgctgtatttcttacgtgtagcaactctcctctcctgttcatctagtaaactcctcttctgccctccaggtggttgaaacattaacttcctctaggtctacacggtgctttgcacctgatttggcttgcacctcatgctattctattaatttatttgcatgttgcctcctcttctagactaggtttttgagaaagtgagagaaaaatcaagaaatctgttttagaaaaattaatccagaaacaatatttgtgaaaaattggataaaggatgaggaacaggggcaatttagaagattgtttagtatctatattcttatttaacagcagccttcagagctaaagaagcccaaaggcctcttaacacctaatcacccatttattcctcttaaactctcacctgcaatcaaaacctattcagaaaaccagaattttaatgtaaagatctcagtatgaaggtttttggtattttatgatctaaacaaaccttccaaagtctggtgaggctcaagttggcaaaccacctgcaatcttcccactaaactatatttagtatcccactgtagcacccactgcaactgacatatgaatacactgtgctaacaaatacattacttaatacaaaactcttcaatttattacattgtgtcataaatttgttttgctttataagaaaatagattttaactcaaaaagtttcttatttggaacaaatgcatgaagcaaaggttttcaagcactggacatcaagcaaccaacaacttaattcccaggaaatgaaaaactgatgaggcaagctgtatgactgccccagcttactgcactaagaacttctgggctatagcacagggaggggaaaccatgagaaagcccagtgaacacactgagctgagagtctggggagaacaagttgacttgagtttgctgctcaggacacaagagcggagattgctgtacagagagaatcttgaatatctgcaggtcttccttgagtattcagcagagttctgagtggcacaagtacatgaaaaaataacctgaggctagggaaagaatcatctgaaaggattacagaaaaaaataccaggtgcttacaaggccaggaacagaaattgtgctcaccagccagactgtaaaaccttataattaacagggcattggatagagcactcaaaagaatcttgcctcagaactaggcaataattagccatagactaaatgatgctctttctcacctgacaaactgtggagacaaaacccaaaacaatcacactatttccaagtaacttaactacatcccagaacaaagcacagggagatctgtagaaacacaaaaaagcaaaactctgtctgggtccaaccaaagattaccagatagacagatcaccatacgtgcaaagaagcaagaaagtgcaacccatagtgagaaaaaaataagacaacccagaaaggccacaggtgtcagacttattggacaaagatattaaacagttactatttgtaatatgtatgtccaaaaagttaagtagagacatagaagatataccaaagacccaaactgagttttcatctagagatgaaaactatatgaaatgcaaatatacattgaatgcaattaatggtagaatagagattgtaaaagaaaacattagtgagcttgaagacataacaacagaaactacacaaaatgaaatacagagagaaaaaagagcataagtaaactgcagaatgacttcatgtgtgatctaatgtacataaaattggagtccctacaggagaaaggggagggtagaaaatatatttaaataaataatgaaggaacaaaactgtaacatttgataaaaaacataaatctacagatgtaagagactcagttatgataggtacagtaaacatgaagaaagctacaaaaggacaaagtataatcaaattgctcaaaaccagtggtaaaagagaaacatttaaaagcagccagagaaagacgaaacagagattaggattacaacagatttactgttggaaacaatgcaagtaagaagacagtggaacaacatctccaaaacatggaaagaaaataaataactccaaaatatatatatgacaaaaatatttgtcaaaaactaaggtaaaatacagacattttcagatatgcaacagctggaaaagttcataaccagcagatccgcactatggaaaatgttaaaggaagcccttgaggcagaaggaaagtgctaacagacggaaatataaatatacccaaagcaataaagagaactgaaaaatggtaagtctattaaacatattttataatttgaatatgtttaaaatataattgattagttaagaaaaaaattatatttttggagttgataacatatacaagtaaaatgtttgacaacaataggaaaaaggtggctggggaaggagtaatgaagaattgcaaggttcttacactgaacatgaagtggtaaaatattacttgacagtaagctaaagatgtctactataattcctaaagcaaccactaaaataacaaagcaaagagtaatagctaataagacaacaaatgagattaaatgaaaacaaaaaaataactcaatgcaaaagaagacaggacaagaggaaagggcaataattattcaattacattaaataattgcattcaatgctaactgcattgaattacattgaatgtaattattgatacggttaggattgtctattttccatcctgtttttatttatccaatcagataaataataaataatatatgtaaacactataaaatcccagttaaaagacagaaatgagcagactgcattaaaagatcaagacccaattatatgctatttataagaaatatactgtaagtataagaaaaaccaaatagattaaaataaaatgatagaaatatatattacatgctaacattaatcaaaagaaagctgaattggctatattaatattaaggtagatcttaacgcagccagggataaagaagtttatatcacattgtctaacggaccaatcaatatgacgtaaaaatctaaatgcttatgtgcctaacagcagagcttcaaaatacacgaagcaaaagtgaatacaacttcaaggagaaatagacagtcccttaattatagtcagagatttcagtatcctgccctagtaattgatagaatacataggaagaaaattagtcagacttttctgactaatgtagccttgaacaacactatgacaccatggtctaggtagaaaatgtaatgaaatctacagaaaaagctactaaaattaataagttagtttcacaaagttgcaggatacaagatcagtaaacaaatataaattacatatctatatgccagcaactagtaaatataacctgaaatttaaagataaatgccatgtatactagtatcaaaaataaaacatacttaggaataaatctgacaaaagatgttcaagtcctgtatattaaaaactataaaacactgcagagagaaattaaagagatctaaatctctaatggtagaacagagattataaaagaagcactagtgagcttcaaggcataataatacaaactacataaaatgaaacacagagagaaaagaatagtgaaaagagaaaaaaagaatataagtgaacggtggaatgactacatgtgtggtctcacataaaattggagttccctaaaggagaagggggagggtagaaaatatacttgaataaataatgaaagaaaaaaagacccttaacatttgatgagaagcaaatagagagacataccatgttcatgatttggaagaatcgatattgttaagatgccaattctttctaaattcatttgtagattcaatgcaatcataataaaaatcctaataggctttttatttgtgtggaaattgacaagttggttctaaaatttacacagaaaaggtgttaaaataaccaaaataacttgaaaaacaagaataaaatcgaaagattatactatttgatagaaaatcatacagctatagtgaccaagacagtgtgataccagtgtaaggactgacaagaaccaaacagagaatccagaaatacaccacatatctacaaacaactgattttcagcaaaagtgcaaaggcaattaagtggagaaaggacagtatttcaacaaatggtactggaataactggatactcatgtgcaaaagttgaatttccatccacacttcacaatgaatcttaaacccaaatgtaaagtctaaaactgcaaagtgttctgaacctaacatagaaaaaaatccattgtgactttagattataccaagatttcttagccacaactccaaaaacaagaaccataaattaaaaaatgtaaaacagaacttcatagaaattaattttttaacaaagtttgaaagacatgtctttacaatctctaaagacaagccccatacttagagaagatatttgcaaagtatgtaaataacttgaatgtagaacatataaaaaagacttttcaaaaatcaacaatgagaacaaaacaacctagtaaaaaaggccaaagttttttgaacacatcaccacagaagatacatggatggaaaataagtgtatgaaaagatgctcaatacaaccaatcatgaaggcaatgcacattaaaaccacaatgagataccactacatacctattagaatgtttaggattaaaaagatcaagtgttggcaaggatgtggagaaacaacaactctcctccattgctggtagagatgtaaaatgatataagcactttggagaacagtttagtgggtttttaagaaaatgttaaacatactcctattatttgatccaaacattccactcctaggtatttaccccagagaagagaaagcacaaagacattttgtgtgttataaacatgtgcacaaatatttataatagcttttatgtataactgcccccaaatggatacaacccaaacgtcctctgacaggttaagggataaacaaattttgttatgtccatacaatggaatacggctcagcaatgaaaagtaatgaacaattgatccatgcaacaacatggataaatttcagaataattacacagagtgacagaagccaaacaagaaagtacatgctatatgattctacatatataaaactctaggaaaatgcagactcacccatagtgacagaaagcagagcagtggtggcctggggatgagtggggtgtgtggagaagggtaggagggatcaattacaaggggtctgagaatgaatttggcaatgatggatacattcattatcttatcaaaacaataataatgcaaattctatagcatgagttacttacatataattatacatatgtgatattttcaccggtatataccaatgtgaaagcttaccaaattatctaaatatgtgcaatttacatgtcgattatatctcaataaagaaatgtgaaaatgatacttcctatttcttcctaattccatgcaatttagacttcatacatgtaatactttctgtaagctcccagcaaggtttctttcatcaacatcagctaaataatttggagaaatttatcagaaatttcaaagtatgtcaacttcaatttcttcttgtaatttcataggttaactttcttctctaaccttagtccaaatgcactacaaaatattttctcatgctttcattaacctggtcttcagtgcttcaacagattttggtgattgtaatatttacagagtcaacaaagtgaagccaatagcactactgattggaaaggcaggggtgggcccctaagcaaggtaacccgcagaccaagcaggagactgtcctgagcagatacttccccactctgaagggagtctcaagttcccactactgaagcacagaacttgtacttcccatttccttcgggacaatctggatgcaggaggctgctgtgctaaaaagttttcaccatgtcactagcttgacatctacttttacgacctctcattcttaattatgtccctgaatcccagctcctgagctcatgtatttatctttgtccagaaaagcggaaattgtaaaaacaaattctatagcatgagttacttatatataattgttatgtggggtctctattatttcaagtcattaatcagccaagttccattattttctgtaagtcaatccttttgccactcttcccataagcacctcccaatagaactatttcctttgttaaatgcatgcatatgcaggtttttacatgtatattatgtatcaattatcatataattacataattactgtaatcggatttaactgtataattagaatgtgtaattacataattaaaacatgtaattaccaagtttaaaaagttatggaaattatttcttttaaatgaataatgcatgtatgggagacaaactttcaaagctcactacttaggccttctaaaagtcattttaactaaaaacacaatttaaaatccactaagccagttatttcacatgacatgttgaataccttaaacttttttaatggatttttatcttaagagaatattagaaaccttcaagggctcagcatctggatgtaggaaaaggagacaaaaaggcagctctcttcaagtgatcatgaagtctgactgcatttttaacctattcccacttacattaaaagttttcttggctgggcgcggtgcctgtaatcccagcactttgggaggctgaggtgggaggactgtttgagcccaggagtttgagacctgcctgggcaagatggtgagaccctgtctctacaaaaaattttgaaaacttagccaggtgcagtggtgtgcgcctgtagtcctagctactcaggaggctgaggcaagagggtcacttgagcccagtagtttgaggtggcagtgagctatgatcatgccactgcactccagcctggccaataaagtgagactctgtctctaaaaaataaaaagtattttcctagggtgtctttttttttttttttttttgcagctattgtaaaagggattcagtttttgatttgactctcagcttggtcactgttggtgtatagcagtgctactgatttgtgtacatgaattttgtaacctaagactttactgaattcatttatcaaatctagaggtcttttggtggagtctttagggttttctaggtgtacaatcatattaccagcaaaaagagatagtttgacttcctcttttccaatttgaatgccctttagttccttctcttgcttgattgccccagctacgacttccagtgctatcctgaatagaagtggtgaaagtgggtatccttgtcttattccagttcttatggggaatgctttcaacttttccccattcagtatgtgtgggtttgtcatatgtggcttttattattttgaggtatgttccttctatgcctagtttgttgagggtttatatgataaagtgttgctggattttatcacatgcttattctgtttctattatcatatggtttttgtttataattatgttggtgtgatgtatcacatttattgatttgtgtatgacgaaccatccctgcatccctagtgatcatggtgaattatctttttgatgtgctgttggattctgtttggtagtatttcattgaggatttttgcacttatgttcatcagggataggaagtgaaagatctctacaaggggagctacaaaacactactgaaagaaataatagatgacacaaagaaatggaaatacatcccatgctcatggattggaagaatcaacatcataaaaatgaccatgtggctcaaagcaatctacagattcaatgcaactcttttcaaaataccaacatcattttcacagaacaataaaaaaaatcctaatattcataaggagccaaaaaagaggctgaagagccaaagcaatcctaagcaaaaagaacaaagccagaggcatcacacgacatgacttcaaactatactataaggttatagtaaccaaaacagcatggtactggtataaatgtagatacacggaccaatggagcagaataaagaacccagaaataaagccaaatacttacaaccaactgatctttgacaaagcacacaaaaacataaattggaaaaaggacaccctattcaataaatggtgctaggaaaactggacagccacatgtagaggaatgaaactggattcttatctctaaccatctacaaaaatcaactccagacggatcaaacacttaaatctaagaactgaaaccagaaaaaaatctagaagaaaacctaggaaaaacactgctggatactggcctaggcaaagaatttatgactaagaacccaaaagcaaatgtaacaaaaacaaacaaacaaaaaataaatgagacctaattaactgagaagcttctgcatagcaaaagaaataatcatcagagcaaacagacaacccacagaatgagagaaatatttgcaaactattcatgtgacaaagaactaatatctagaatctacaaacaactcaaacaagtcagcaagaaaaaccaaataatcccatcaaaacataggcaaatgacatgaatagacatttttcaaaagaagatacacaaatggccaaaaaatatatgaaaaaatgttcaacatcagtaatcatcagggaaatgcaaattacaaccacaatagataccaacttaccacagccagaatggcagttattaaaaagtcaaaaaacaattaatgttagtgtggatgtggtgaaaagagaagacttatacactgctagtgagaatgtaaattagtaccacctgtatggaaaacagtatggtgatttctcaaagaactaaaagtagatcaactgttcaattcagcaatcccactacagggtatctatccaaaggaaaataagtcactatgttaaaaagacatctgcacacatgtttatcgcagcacaattcacaattgcaaatatatggaaccaatctaagtgctcatcaactgatgagtggataaagaaaatgtgatatatacaccacaggatactatttaaccatgaaaaagaatgaaataatgtcttttgtagcaatgtggatggagctgggggccattattctaagtgaagtggctcaggaatggaaaaccaagtaccctatattctcatttagaagtggaggtaagctatggatatgcaaaggtatacagagtgggaaaatggactttggagactcagaggagggaaagatgaaatgcgggcaagggataaaaaacaacacattgggtacaatatacactacttggatgacaagttcactaagatctcagactccatcactacacaatgcatcttgtaaccaaaaaccacttgtaccctaaaagctattaaaataaaatatatgtattttaacaagttttcttagtgtaattgacagcaaataatgagcagtgatgactagtacaaaagtcatcacccagctgatgttttggtaaatccaggaaatggtatatctgattcaatcccatgcttggtttcaaaggcaaaatgttacttaaaaaaataaatgttgactatatacctgcttgataataagaaacattcacctctcttcgtttaagttcaacttaaagaagaaacatttttgaaaagtgagaagtgtgttacattggtggtattatgataataattcaagtgtgcttgatgctggggataaaatgacaaatcagatgtgttctctggccttgcgttgttcagacaaacacatgagccaataaataaaacacaaagagaatatggacagtaatggctttcaaaacttaaaaaaatctaataataaatcattacaatttgttgcctgaggaaataatcctcatcatgtaaaccagaagtcaattattgatttttctgaccacaatcaacaccacagccgagtatgctctgtgcaggaaaatccctactcctcttcagacctgcctgtaacactctatacatatttaatcattaataacataacacttatcctattgcttcacaattatgtatatgtctatttcttcttttgaatgtgagttccaggagggcaaatgcttagcgcaggaaacatctgcctgcaggagtcttacacacacacacacacacacacacacacacacacacacgatgaaggaacatttgcccgctcttttcatggaacaggatgcttttgtttttgtctcttcacatcacaagtaaccagcacatctttgaaaactcaacagtttaacctggaaatgttcataaagatcattctcaaatgacaacttattcttggacaaaataagaaatgcaaatgcaaaataaaagaatgtgtcccacagagatgatagaaaaaaaaaagagcagaacagttatagtaaaccacaggctaaaccctcatattatgcattgcatcagccatgataaataaggttcgcatttgtcagatccgatcaacttggtttctagggtagtccaatttcagcagactgctctagcactaatcatcttgtgaattcatctgtggtaggttaatgttcaattcattaattaattactcccatcaacattcattgagcttctgtctactacatgtgaagcagcatgtggggtatgggatatgcaacacagagcggaaaatagcccctgctctcatggaattcatgttccaggaaaagggcagacacgtaaacaagcctaacactgcaaatgctcagctctgcgatgggagtgtgtgccaggaccccaggagcatggaggaggatgaggacccctgaacaaattcaatgcgatgcaccaggaatctcgctccctatggctccctatttgtttcctctggggaaccactccagacttgatggggggaaatcccagttgaacttgatatgacagagcaagtaacttagaacaacactgattctgcagaacctggactagcagacctactagtcacaggagtcctatcccttcttcatatacctgtctccacgcccccaccctcattcaagataaaacattcaccagcattcctcttaatgcatctttgttgggaagatgactggagcccagcacagtgtatggcaaacagtaggcgctctgtgttgaatgctgaatacttacatgaataccactgagaatccacagtaaaatacatttgtgtgttttggttttgttccaacagattttcatcatttctgaagaaagagacatactcctggaatgtggcacatggaaacttcctggtttatcaggagttgatcatgacctctaagagctcaaagctcagctgaggcttttgcagaactgggaagcatggcattcgtctcagcctaaccccccacattccctgtgttgcttgtgtggtgttactggcgccaccagggctatcccttgcattcatcaacagataccgagagaaagttgctgttcccatgttcatgaattgaacctgtcacccatgaatgcacttttggctcatcagattagctggttgtcacctcataaatgaggaaacagggtcctggatggaagaggatggtgcataggacaaggcagagaaaacggagtggtgggtgggttgctgcatggtctgttggctcccgaagtctaataagatgacagaatctggagtttggaaaggatcctggactcaccatgtacctaatgcatgaattcctaccaacgcacccagtttctgttcttcctgggatggagaactgtcacatcccctaattgaccatttggctttctgatatctcagctggtggaaaggtctttttgatattgagtcccaattcataaattctactccgtggtcctggtttttcactctgaggtcaaaagaaccaatctagtcacctgatgctgtgatcttagtcctgaaattaagagtcaatattacttgctgccttgacatctggtaaaataaggcaggcctcaattggcctaactgcaagttctccccacactgcccctatggataaagtcttgtagcaaaacaccctctttagcagggggaccaggcacagttcctgcttatcgctgagtggcgggtttagctccctgccagcctgtggaattagtcaaacaagccaatcacatcctactgtgagaaccaggggtcaacctaccctcttgttactacaaagctggcctctggcagtccccgctggctcactctgttcctgaatacaacccctctgtgcccctgagccccttcccaggctgtgagtatatgtaattaataagtgcctgtcaatctcatctgttcattgtcaggggctgtgtgttcagccatacccatcaccatagggtaggaatccctccctcgccaatggggtgaaggggaggcaaccaaaatagctacgtcttagaacgaggctctgggaaccttagaagagtgggttaaagagaggccggaagaactctgtttgattagaatttaaaattcccatttcctccctctttccacctttcctaaacaccactctcaaggttttctcaagtgactgtgggtatggaagctgatgtaacacaatggcaggaaacaagaacaagaacaagtgaacaaggcagaatcaagagagccatactttaggaaaaggtatacaaagaaatattctgggatcccaggaccatcaatgacagtaaacttactctagaaaataagtgtcattattcactggattcaccagcacactctattgttcttactgtagttctttggctaccagatgcccaggtaccagaactctatttgtctctgtatgaaaatacagagtgatgaacaagaaaactagtgattacaactaatgcatgtgttctagttacaaacacaaacctgcccctccccctcctctgagctaatggatgaacctcaatcaatacactcaggaaagactgcagaatcaataacaaggcttatttaacagaattaagaagtggctttttaaaaaacaaaagaaaaaaaaacaagaaagtagacacaattgcaataactgcattcttatgttgcctggcaacaagatataaaaatgatgtacaatgtcagtgacttattttcacatagagaagcagccccctgccttggcaatgctataatgtactttcccccaactagaactccacagagactattaatgctaccattttccataatacactgttaaacaatcatgtgtttttgttagtgcattaaaacactgaatttacttaatgactactcagtgaggcagcggctacagaaaagggaggagtttttgtttcctttgcaagcacaggagttcgttccctgggcaggagaatttaacaggtagcaatggatatgaatcaaagcactggaattcacatacctagagaggaaggtgcactcttacgtcttttcaagggaaagcagaaaatgaagtcgaagtgcagtattagtgttccttgactttaaaaaattttctttagaatatgaaagaagtttctggaaggcagaaagcctttgaggttccaagacatatacttggacatgggagtgaaggttcaatagaaaaggaaagtgacagcagagcgctttagctgagaagaagagaagaacaaggagcggctacagaggcacccagctctcagggtctacggggcaagccctcaacgcggggggctggcgctcctactgcagcctgcacctctggcagtggggagggggcacaggtttgcaccctgctgggggtcacacatacattagctcatttcatccttctatgaaagcccattcaatagaagcagaaaatagattcaatgggattaggtgattacccagtgtctgtcggctagtgaattggaaagctggaatttaacactaagcctgtctgtcctcagagccaccacacacctttgcctccattggctgtcactaatttccagctgtaggggatgttctgggattgctgccatttagtgcccatggagcacaagtaaggaggaaagctatttcctccaaagaagcaataaaacaaataaaaaacaagaaaccactttcctgatgagtcccacatcccactgcgctgtatttatgtgcacatttgttaacttgcacacttccatgattttttgcaagcttcttactcattgttcactaactcctttggtacagggccaggtgttatatttttataagaaatagttttaaaacaactgttttctgctgaatagagcattttattcaggagacctccagtaaatactgatggacaacttgtgggtaagggaaaggtcactttgttttacaaaatctttgggaaaaggaatctgtcttattcacagtgctatcttcaacacctgcactggactacagtaagtgctcaataaataggtacaaaatcaacatcatgcactcaggaatttcaaagtcttcctgatatgctgatggaccagtgatttttactcaggatccttgggggcttgaaccaatactggtacctcacagcctaactgaaatgagcaaaaaagatggataacgtgaagtggaatgctgtggttatggaaagggcagacaattataggcaaagacaacttgatgtcagctcagcatcctcccggttgctatgcaaccccagagaagtcccttgtcttacctggccgctttaacctcaccacacctgttcccccatctgagagataattacaacacttactgtgtcaggcagtcaacaagtatttatggaatgcccacagggcacagagcaataaacctattgcttacttaagccaggaaatcaagctacagcaaagcagaggattagtacaaatacctgggcaaacgtgccacccgcagaagcattaggttcttaaatcctccaggtaattgtggtcacacattagtcttggctttagggccttttaaagtagtatctgaaatatcttgtctatccactttagttcaagtgtgtgagtgtgtgtgtgtgtgtgttggctttccatctccgcttaacaaatcacctcaaacttagtggctgaaaacaacacagatatatgatcttagagtttgaccgctaaaagtttaaaatgcatgaaaaccaaggtgctagcaagaccacgttctgttctggaggctctaggggaaactctgttcttgctccttgcaatttctcagggccatcacattctttggtttgtggcccctttttccatcttcaaagccagcgacactggacaagtctttctgatgctctcatctttggaattctctttcctctgtcttcctcccccacatctaagggcctttatgattacattgtacccatccagataatccaggataacctccccaactcaaggtggatgattagcaactttaattccctcttgccatgttacctaacatattcacatggtctgcggattaggacatgggagggacgtgcttttctgcctaccacatgtgtgtctggctgtaattatttatctattgagagcaatgaaaggtcattcattctatgggtacaactcaggaccttatgtaagatcatctattgccttcagaactttatgctctcaggaaggtgataagtatgtaaaatattaacaaccaaaaccaaccctgtagtttgcaaagcactttgacattcatccttttggttagaacctctcagctactttgcaagacaagtaaggaaactattattatctctgaatcacagatgagtaaactgaggcacagaggttttttggtttttttttcccttaaggacagaaaacagcatattcaaaccgaggcatgtgggtttctggtctggtgctctttatcctccccgtactgcaaacacctttacagtatgtgtcatattgacatatgttgccaaaagaagagatcctgctcctatttcatgaaaggaaaacagatgtgaggttgttcagaaactcaataaagtgcataaagtatgccccttgcagagctgaggcaccagattctccctccattaattcagtcttatccctgatccatgcttgcaaagcaagagacaagggaacgaaaggacagaaagaatttctacaggttgagtcaccatttggacgcagaacaacgtggcaatgtgggcacttcatgcacacagttaaaataagtcacacgctttatgtctgcatattttctttgtatgaataaaagaatgcagctgtacgatggccttggccttgtgtggacagtggtagctacgtacctgaacacagacaatgagagaagttgagaactttcattaaaatatttcagtcatgtaagccaatgagcattattttagtctccataaagctgcattgtttcaatagagaatccaaggccagaaatgtgctcattctaggcacaatctcacagtttgtcctgatgtcttaccttgagggggtgtgggcaatgattcttgtgcccaatgcaaagagatgccctgatgattagtgtaaggtggccaatcctgatgaccaggttcagacatccagagcctgccagccagcaaatcaggccctacattttctccctctccattttttcctttcctttccagaagcggtcagcttctagaagccacccacagtggcctctacaaataagatgttacttctgaagtaagatcattgtcttccttccgataccctctgacgaaacctctgaaggtgaaacactagcagaggctgaaaagtcatgatcacctgctggtaatgccccacaaaggcacggaggacacacgtgctgagcagtacctgatgcagcagcctctggagataagactttccccagaatccccaaattctcacgtacacggcatcgtccatgactctgacagtcatattgatgacagatacgaaaaaacatggtcgttggtatcatagaggaaactacataaatgtaaatgcataaagggaagtcgagtgtgactccctttcttaattgtctaacgcaattcccactagatgcataaattgcagttcctattaacggcactatgaataataatcggtttactttctgacttgtatctaaatatactttctatatgatttcatcttttattcagctgtttaaaagcagaacatctaattacagttcctattagtcaacattaattttttttctttttgccatggagcatgtgtgatgactgattttctaaaaacagaattctttagcatatggaacaaatcgtgttattattaatgcattcccagatgactctgcatatcaattctcttaattatttagtcattgctgattatgtctttttataattcattaccctatttctcgcagtgcaggcattttattcattaagtgtcaaaatgaagggcttgacctccaaaaaaaaaaagataatcaggaaataccgacacagttttacaagtctgcgcttcccttctggaacattttcatgctgtgtgataacatgctttaaacaacttttccaaggacatcagtaggtacacatgacagggttgcaggcagaggttggagggacgtcgagcaggggaggctgtggagttgctcacacgaggtttttctaaagatgagacggcaccagttccaactacagctcaatcacactgccatgttctcattctaaacaaaaatgccatttgtgtaatagatttttataccagttttattcaaaagctaacaggatgcttccaaaagagctctttaagtagtagtactgggaagtctaggataagaaacatttactaaattaaaagaggactaggtcttaataagaattcactttgccttcaggctgatcctactgaagttatgaaacctgacctggagtacataacaaggcctgtgtactacgatcctcatgctcatgttggctcattatttcagtgaggtctgtgcaccttgtctgagaccaaattcattacttagaaaaggcaaataaaaaatatgaaaaagaatcaaggaagctgagactgtgaggagattaaaggagaacaaacacacctacttctacctggttagagccttctctgtatctaagatgtcagcttcacacagatggaattttgggaagaatctccccaggcttcctcaacaactctgctttatttgtaacctagatggtagccactacagtagcaaagatcacagtcacatagaacaaaacagttcacctgtttataaagtgcaccttccagctaaacacatggctgctgaccctaccaagttgagtactactgagcaagttgttctaatgaaacccattctgtctgttttctgactaagagcaaacaatagatgccaaatactcaaagaaggggtgtacctaggcacagccaaccttgcaatggaggggtccaagaagagtgttatgaccttcagctcaatacccacctgagggtctacaagggttgaagctgaagaggccaagaaagaaactttcttgggggaaagttgctgtagtatgtggcatttttcctcccctatctgtagtgggtaaggggatgacagatatttctttctcacctctagcctaagtaaaagagcttctaatcacacaaaccaccaccaccaccaccaccaccaccctcaaaggactttatatttgttctgggggcttggggataactaactgaagcctgaaaaagcccacaggggaaaggcaactgaatggcctgagatatagcacagaagggtatactggatgtgaactgcactcccacctacagagagacaaaatatactactgcatgcagaagctgagttggagcacgcatagggaaggaagggcaggtcctggggaagattgaaagggaggcactaccttcatcaagggagctacagcttgacattcacatggggaaaatctttctggaaccatgaaaacatcccacaagaaaaagaaccctccaatctccaatgccagctcacaggaatagccaagtaagattgttccagccccttaccactcttttatcacactagctccggctcctggaggagccagggccccagctaaaaaataaaagaaggagaaatacaaggcagtggaagagagaaggggcaaccatgtccctccacccctcccaggattacagcccaaagaaggcccaaggtggaggaaggaaaaacttgaagtttagagctttgactatgccatatgatttggcattttaattatacttttttttttttttgagatggagtctcactctgtcacccaggatggagtgcagtggcgtgatcttggctcactgcaacctctgtctcccaggttcaagtgattctcatgccttagcctcccaagtagctgggattacaggcgtgtaccatcccccccggctgatttttgtattaaaatgacacatttttgtcactaagagtgactggagaacttttttattatataacaatgtctagaaacaccatggaagctatgagatttcatccaggggcaggggaggaagtagcccacaaaaaaggtctagagagacaatgagaagaaaaatagagttgctttatgatcatgaattgttcagtcttattccttggatgtatcagttgcattttttattatagcaaaatataacaaaattttaccactgtaaccatttctaggtgtacagttcagtttaagtatgttcacactgttgtacgaccagcaccaccatccatctgtagaacttctccatcttcccaaactgaaactccatactcattaaacaatatgtaatgattgcattttaatgagcaaatagaagaattcagcacaagtcccggctcctgcctttggcacttactccatgctgctgctgctgttttacttttacttattcaatttctgatgctcttattttctttgtgtagatctgactttctgactatatcatattccttctgcctaaaaaattgcctccaacattacttgtagagtatgtccactagcaattaattccctcagtttttgtttgagaaagtatttctccttaacgtctgaagcatatttttgctgtgcatagaattctgggttgagagttttttttttttttcctctttcagcatgttaaagatgtcaccccactgttttcttgcttgttagtttctgacaagaagtccgctgtactacttatcctggttccttctctctctctctctctctctgtgtgtgtgtgtgtacatggatatttaccttgcaaggtatcctcttgagtttgagcttctggggtatgtggtttggtgtctgtcactaattttggaaaattcttggcccttatttcttctgccctgctgtctttattttcccctctgtgattccagttacatgaatgttaccatttgatattatccaataggtcttggatgatctgttctttttttttttttttaaatctcattgcatttcagtttgggtaactttggttgacttatcttcatgctcactgattgttcaatgatgtccagtctattgatgaactcattaaatgcattctttatctctgttttccattttaaaaattttttatttggctctctcttgtagtttccatctctttggcgacatggcctatataatcttgcatgctgtttaccttctccataagagccattaacatattgattgtagccatttaaattctttgtctgagagttctaacatctgtgtcaaatctaattctacttctgatgactgctttatcccttcagactgttatttcttgctgttttgtaagtcttgtaattttttgttgaaagccaaacatgtcatctaggacagtggattccaggtaagcacattgcatgcttggagatgaggatgccttcctcctctgttagttcttcagtgtggaggtttctgttaatgtggtcaggagtctagttgtttgtgaagactgctatctgcttggctatgagtgtccctccttggctttgggtctccctttgcatggttctccaagttgtattccactgttattcttctcaaagcttgttagtgtggtggttggagagtggaggagagaagatggtatctgatgttccgattaagcctcagcctcaggtaggcactctgaacaagagtcttggtggtgtgtccttcacaagtgttcctgagctttctccagatataccgtaatgttaggtagcacacattcctgccccttccccatgggtagagttttttgtgttcttcttttctcctcctctgggtacagtgagtttccaccaggaacctcaggatacattttggttgcccttcctcctgtagattagggcatttgtttcttaggaatgacagggaatatgattctgagttgaatattgctagtggttgccattcttcttccccttctctagagggatccaccagtgccctcaggctgcagttctgtatccttcctgaagattaatgttctagtcagtaggagagatgaaggacatgggttcagctagaggttctgcagtggctgctgttcaacttcctcggtcaagaccacaggaaaggcttctcgagattctcccaggtcttcccttggggcacctggcagaggagacgcctacaacaaagtacaaacctccccgggtctgccaccctctcctgcgagcccatgttcagcctttagcaatttgtttaaagtttctagccagatcttcttactggctcatacggtcttgtgtggtgttccccatgtaagcaaatgtccaagtcctgcttcttcctgacacgtctatctctcttcatatttcagactgttgttttccatgctatttcagatctcccaaaggagttttctgtttctttggctttttttcctgttctaagagggggattactgctccttccagattactgcctttagctctgagttgaaatattgctgagtttttattttgttttgtttttagagatggagtcttactatgttgctcaggctggctttgaactcctaggttcaagcaatctttccacctaagcctcccgagtagctgggactacaggtgcatgccacggtgcccagcctgttgctgttttatcagcactttaccaagttgtgtgcaatctttaatctctgagctaaacaactagcctgggtcaagcacatgttgcagcttccattgtcggagaagaaaatgagttagaaaacttattactgtatttactacattgaatatgcatgaccaatccttcattttcaagtaatcacagtgtcattataaactctaaattcactcagaagtgacttcttatcagaagtaaaaaaacaaagtttataattttagatgcctttgccttcttatgaagacatatgcagaattccatctctgactcgtttctggaccctggaaataactggctttttatagcaataactcaagggactgaatataatttaaaagtaatatacccaatacaggttgagcataccaaattccaaatttcaaaatccaaaatctgaaatactccaaaatctgaaagtttttgagcaccaacatgatgctcaaaggaaatgtttattgtagcatttaggattttagatttgggatgttcaactggtataatgcaaatattccaaaatccaaaatctaaaacacttacactcccaagcatttcagataagagatactcaaatcattaaagtacttattgagactattaggtgggtgctacaaaatcatttcccgacagaaatgtagggaatctcattctaatcaaattaaaactgtacatcaatgaaaaatacaacgttgaaaccgacaatccttcatccatggtaaatgaatgtcaatcaatttcccctcctgtgtctttgtttaaacgtctatgtaaagtctggagattttctgagcctatctctttggcaactcccactattttaattcacagtcctttcaagtccaagcaaatttctgagtttcacattgctctcctagttggataaatctttatatagaaagcacttacatttcagtaggagggtttagtcatttgtcaataaatgagatagctggttcaagcaatctaccaagtttatttctatgtgaaaatactgctagaagttagcaggtatacatgatctacatgattttaaattctttgtgaattctcaaaataaatctttagaaatatagtatactagaacatgtattataaaaattactttgcctgggtaatctaattcatcattgggcatacttagtatagccatatatacatacttataaacacaacttacaggtataagttgacataaatgaacataaactgacaatcaactaagaaggcaaagacatttaaataagcacattgtatttaaagagataaaaagctatcaactacctatcaaatgaatgttccaccagggggtgtagtatgcatttattatgtctgcagccaatttacctggcgtatgcacctaaaaacagttgaacaaaaagtatatttttgtagaatgatttatgacgtcccactggctttcatttttattccaaggaagctttgtctgtatattttattgcttttcaattaaatccaaagttatttccaacacttttggttttcaaattaaagctaagttgtaaagaaaactgtaaacaaatatctagattcttcagggaagtctgctattaatgctagattaattctttcctatagccaagaatcttttagcaaagcaattgtttcttagcgttaaatacaatctcacaaatattctacaaatggattttataggttgagatttcctttaagtaaagctcgtcgctaatgaatctggaaatattcagttattttaacaagaataatagcagctaacagtcattagtcccaaaataaagtgtttccttcaatctcagatttacaaaattggtttacctccacaaccacatttgatgaatgaaaacattttattagatatgttgattcactaagatgtgcgtattcacaaatttatccagcaatagatgtaacaagcatatgaaataataaatgagaacagtagcttttttccttgcaaaatgtacactctactgacatctatattgggtcagcatcacccagccactaagcaccaaagctgttgttgaacgcaggagtggctgatgctaaggctcaagctctggtgaaaacccacactgtgtggtcaggggagccggagcttctgccactgggaaactcttggtttctcctgactctccatctttaccttccccctcctggggaagaggacagccttgcctgttgttgctcttactgggggtaatgtgggaaggatgcctccaccaggaggtgccagtcatcatagagctccatggaaggcagcacagcacaggcggatgcaaaaagaatccaacatttcgagatgcattattcagtaactaggttacacatgaatacacactcaagatcaatttgtaaggaactatcaaaggcacagtcatgcatcgcttgacaacagggattcattctgagaaatgcgttgttgggtgaattcgtcgttgtgcaagcatcatagagtgcacttacacaaacctgggtggcacagcctgctacacacctagcctatatggtatggcctattgctcatagcctacaaaactgtgcagcatgttactgtactcaatactgtaggcaactgtaacacccctgcaacacacgggtaagtatgttgtgtatctgaacataccgaaacatagaaaaggtgcagtaaaaatacagcataaaaggttgaaaatggtccatctgtatagggctttttccatgaatggagtttgaaaaactggaaggtgctctgggtgagtcagtgagtgagtgctgagtgaaatgtgaaggcctaggacattaccgtacactactgtagactttataaacactatgcacttaagctacactaaattaataaaaatatttttctttcttcaataataagttaaccttagcttgctgcaccatttttactttatgaacttttaaagtttcttaactttttgactcttttgtaataacacttaaaacacaaacacattgtacaacacattgtacaaaaaagtctatatcctcttctgtgacctttttcctatttttaaggtttttaaatttttttcttacttttaaaacttttttgtcaaaattaagtcacaaacatacatattagcctaggcccacacagggccaggatcatcaatatcactgtcttctcctccacatctttttttttttttttttttttggatagagtctcactccgtcccccagactggagtccagtggcgcaatcttggctcactgcaacctctgcctcccaggttcaagcaattctcctgcctcagcctcctgagtagctgggattacaggtgcacgccaccatgcctgtctgatttttgtatttttagtacagacggcgtttcctcatgttggccaggctggtctccagctcctgatgtcaagtgatctgcccgtcttggcctcccaaagtgctgcaatcacaggcttgagccactacatctggcctcccctacatcttttcccactggaaggtcttcaagggcaattatatgcatgaagttgtcatctcctaggacaacaatgccatcttctggaacacctctggaaggatctgcctgaggctgttttacaggtaactttttaatatataagcagaaggaatatgctctaaaataacaataaaaattatagtatagtccaggggtatccaatgttttggcttccctgggtatactggaagaagaacaaaattgtcttgggtcacatataaaatacactaacactaacaatagctgatgagctaaaaaaaagaaaaaaagaaaaaaagaaaataaaaaggtccgtgcataaaactcatgttttaaaaaagtttacgaatttttgttgggccgcattcaaagccgtcctgggctgcatgcagcccgcagattggaccagcttggtatagtcaatacataaaccagtgacacaatcgctccttgtcattctcaactgttctgtattggacatacctgtatgtgctgggcttttatccgactggaagcacagtaggtttgccgacactaacatcaccacaggcagtgagtaatgccttgtgctatgacctcgtgatgaccaaaacattgttatgcggcacatgactatttctaagctcactagggcccctcgtgtcacacaacaggcatttgagagcctcagtctaacttctcacaagcaatctgcagcttctcaccaatgaagaaacaaaggcagccagggcacaacctttcatttccccaaggctgtgagaaagaggtggtataaacacaagtcttgtgtccccaaaagaagaatttattccttcttacattttggaaatattgatattttaaaaaaattactctgtgtgattttaggaatgtgagctgggctctgggaggcctgagtttaaactccgtctcttactcgctgtgttaacctctctgcatctcagtttccttctctgtaagacaagatgacgtcacaagacgcttcatatccctgcgcctcaaagaaaggcagtcatcacgcaatactgacttaatgggcccttcatcattttttggggataagaggtccaagacacatcttttgtgggaagatgagttttcccagtgatgctaagacactgggggatgggggtggaggtcaggttgggggtgggtttggggtagggaggtggaggcacacattaaaaaaaattgccaaaccaaatttattgctgatctcattttctcagcatttcttctacattcatcaaatattttagccactgccttttcatttcattttcctccagttgcacgtgctttgcttttgatgtggcacacactttgaaaatacattattaaacagatgagcctgtcacccctggagctggcactctgtcccctgcttattcttaacaaatctctctttgtgttcttttgtgctgaagtgattaatcatttccactatccaagggctgctgacaatctttctagatggctccgctgccatgacccctccccgcatccacacagtttgaaacatgctaggaatctgctgctgttcccggggctttattcccatcacagtgggctcctcatccatacggtaactagccaacctccaaaagagctccgcttttatttcttgcctttttccagagttcggggtgggggtgtgcgtgaaggggctcctggcgacttcagcaggaaaacaaggaaactgtaagttaaaaagtcagaatgataaatgcttattttgtagaccagacaggaggtttttatctcactgtctggacagaacctgctgcacctcatttttctgggcagtatcctcctcttcactgcactgtggctgggttttcttctccccttcatgctttccctctggttatctgtaacaaagttttcaaatggctccatattgaaagcccaggctttgactcaccaggctctcaatctgtaatctggtttccagagctgcagcctaggtaggttttgggaagttgatctttttttaataagtgtttacaaacatttttaaactaactttaaaggtactattttaaaagcctatccttccccaaccccccgcccgccccaagcatgcactgttaaactgaattcaaaaacatgttcaaagaactgaccaaaaataccattaggtcacaagttactgccagagaagggaaagctacaatgattcagaaagtattaataaatgtgcagaaataagtattctgataatgttaaggtaattagcatagaatcccagggtgatttttaaaaataatatgtactttacatgtagaaataaatctatatttgagactattgaaaagatatttacaagcacttgaggaatagttttaaattaatacattataagtgtaaaataagcatgctgatcatatgattttaactaggtttcagaaatgtaattactgttcatagaaagatacttaaaaaaatgagtagtcatatgttctttgcagtgctattcacagtagcaaagacatggaatcagtctccatgcccttcaacagtggactggagaaagaaaacgtggcacgtgtacaccatggaatactacgcagccacacaaaagaatgaaattctgtcccttgcggcaacgtggatggagctggaggccattatccttagtgaattaatgcaggaacagaaaataaaataccaggttctcactcataagtaggtgctagacactgactacacagagacatcaggatgggagcgatagacaccggggactaccaaacggcaggggctgaaaaaccaccgatcggatatacccaggctcactacctagatgaggggatcacttgtaccccaaacctcagcatcatgcaatatacccatgtaacaaacatgccatgtaccccccaatctaaaataagattaaaattattaaaaaagaatataaaatccttttttttttttgagatggagtttcactcttgttgcccaggctggagtgcagtggtgcgatctcggctcgccgcaacctccacatccagggttcaagtgattctcctgcctcagcctccccagtagctgggattacaggcatgcaccaccatgcccagctaattttgtgtgtttagtagagacagggtttctccatgttggtcaggctggtcttaaactcccaacctcaggtgatccacctgccttggcctcccaaagtgctgggattacaggtgtgagccacagcacccagcccaaaatccttaatatttttaattccacagaaccacagatctctaattgtttgaagtcacaataaaaaaggcactaaaataaaaacttactaaccaaaaactgcaataataaagaatgaactgcccataggatataacttttataactttctaaggaatccaggggagagagaaatacacacacttgcatacataggtgtaccttattagtgtgtgtatgggagttatgataaataaaatatatcagctagtgctagcatatgataattcctttcaaacctagtatctggagacacatgaagaggtccacctaccctgagctgtcatcagaaactgaagctgcttaggaacgtagtgctggcagagggagggtctctagagtgtggaggtgctgcacacggcacttttctagaatttctgaggtacaagtgggcccaggaatggagttctgggccaatgaaataatggctcatgttcaaaaaacagttaatttaggagtctaaacaaccccagcggtgggttagcgattgtgaaattatgggctgtgtggactgcttccaaaatcagaacaaaacaacatgcaaataaatatgggagcatgctggaagagttctggaaataggtctgagttccaaccctgcattttcccaatacttacattccactgaatccaatgagcataaaaacaaagaatggcacatccacacatcagatttatcagaacgtataaaacgatggataaatgcaatggcaaaggagaaattaggtttctgaggttttttaggttataatgaactaaatgattacaagactataaaaaggtaattatgtcttatttaaaatatatgattattatctagatagatgttctaatttttcaaggcttatattgctttcatcctcaaatgatcattttctaccttagaaattattttctaagatctgtgtgtgtacaatagtaatttgcagcaaatcagtgtaatttcacaacccttaatttgaaaaaataacagaggacactgtatgtgattttcatgataataaatacaaatttaaaatgtatgtttcgagttgatcactttggatagatgtgttttaattgttccaagaactgctttacacagagcatattagcagtggaaacagttttgacttccagcccttgattctaccagcagcaacatggtaattaaccaaattatccctgcaaatgtattagcttgatttcttcaacttgtaaaaattcattacctatcaaaatgaaaggcttagtctcatgaaagatactcaggataaaagtggcagacacaaaaagtctgagttttctgacacacactttagcaggagctgctgcactccctcctgtttctagccctcaggggttagcatgtgaattttcttctctcttgcatttgtgccaattgtacaatgtgttctaatgcttccaggtagcacaacagtcttggcagtccttggagagctcatgttttaggggatggtaccttgaaccatttgcttcaggactagaaggacaaaagggtgaagagcaagaggtcaaaatcattcattcattattcttcatccatttattcacttaaaaaatttttttttaattttttgagatggagtctcactctcttacccaggctgcagtgcagtggtgtgatttcggcttactacaacctctgcctcccaggttcaggtgactctcatgcctcagcctcctgagtagctgggattacagtcccccgccaccatgcccagctaatttttgtatttttagtagtgacggggtttcaccatgttggccaggctggtctcgacctcctgaccacaggtgatccacctgcctcggcctcccaaatgctgggattacaggcgtgagccaccccatctggccatttattcactttttattaaacatcaactaagtgccggtcatcgtgctcacccctggaggtagataacaacagcccaggagaaaataagaaagaccattacatattaagtattgtaataagaataaagtgtaactggcagacatggaagaggaacctctaactcagactttgggaatcacaaaggcttcctggagggagtgacatctctagtgaggcttggaagatatgcaggagtcggtcagctaaatgtgtggtcaggggtaggcagagcatgtgccggggtggggaagagcatgagttgcgcccagaggtgatggtgagagcagtggttacgcctgcagaagtgcagcatggagtgtgaggggcaacgtggtgaaagatgagtctggaagcatacgcacggccacagcatgtgcgactctgcaaaccacgtctgggggtctctggcctgactctatcctgaactcaggggagagccacgaacaggtttccagcaaacctatgctttggaaagtggattctgcctccattgtggagactagtgggaggcagagggctggcaagcaggtctctggagtcatgtaggaaaaggatggtggatgaacaaggagatagctggaggtaaagagaagtggacccaccggagggagacagagctgacaggcttggtgaggaactgaacatggtgagtgtgagggagaagaagaacccaacagcatggacagccggggaatgaagataatccaagctgcaggaaaagccggcagaggtgtgagatgagttaaggtgcaggtgtccatgacacatctaagtggagcaatctggtggccgctgggcaggtgacagaagttcaggaaacagagctgtgtttgagacacacttgagacccatccccacacagatgttaccagacaccatggaagtacagcatctaagtagagaagagtcaggatgggaccctgaggaacaccaacatcaagggggacttacaggaagacaggtccacgtaggagacccaggagaaaggaccacaaagtgggtgaacccaggagggtgtgacagagacaccaagggcatgagcattttcacgtggatcctgcagtcagcaacatcaaatgcctgccagagatcacatggggaaatgctctctgtacttctgataagcaagcctggggtggtaacctcagtaaaagccatttcaggaaggaaggtggtgggagagatggcagttggttgaaggggaaatgaaagtgaagacacagagagactttggtctggagagtctagttaggaaggaagaaagagctgcaagcaatgtagcactgaagatatatatatatatatgtatatatatacacacacatacatatatacacatatatatatgtacacacacatacgatggaaagaatctgtatgtgtttactgagaatgagatgccagcagagaggcagaggttagaagagggcagagagaggaggtgctcactcctgtgctggcttcagtagtgcctgtttcactcacccttgtacccccagcgccgagaacagagcctggaacagtgactgtctgatgccactggcccaggggtgctcattggatggcatccatctctctggggacagagaaggtgaagcgtctgcggagggtgacgaggacagtgacaaggaggtgctggtgtcacaggtgtgcagcaagcagggatggtctaagccaggcattcccaatgggcaccttacaaaattggttcttggggatgagaaaaccttactctgtgtataaagcacagactcacataccatgtacaaacagacatgcggtatctctgtggtattagaatttcatttgggaacaattgggagaaaagtgtcttaaaggttcctgagggggttgataaagtcaatggtaaaatgactgaaggatactcttcaagtcagtaatgctggtgaacattgcattgatggtgagctccagcggggaataagttacccttcaaggaagagagcatagtttggttactgtgatcctgccctggcagtgagatccagcataaagcagacgtcgcaaccggctggctgcctggaggggtccgcgatccagacctccagcactggctgctggagagaagcagcctggactccaacctgtcagtcctggagcaagtcaggagcagtgcagaccagaaagtggacaagcaaggcagcaagcacgaacgtgtagcgagctagcagagaccgccacgagacggacccacttccaaagggggccatgactcagtataacgatcccagccacaggctgaaaccagcaaggcttttggggagaaacactgtagtgcccttagggaatttgatggaggcagtaatgggactgaaaggtctttggtggcttacactcgaggacctgtttgcaagaaccagctgcctgatggaattcctaggtcagagtgaaaagttaaaaatgttgggtagagctgaagttcacagagcccttcatgctagggattttatggcacaagaattacacacacacatcacacacgtacacacattcacattccaaaaatacttttagtagaatcttatttgccttcatattttaagtactaatatcacttcagcagatattttggtgtctctacactaagtcctcacttaatgtcatcaatagggtctttgaaactgaggcttctaagtgaaatgctatataataaaaccagttttaccataggctaattttgatataaacaagagttaagttcctacagcacatttctgatcacaaaaacatcaccgaacttctccataaggtccaaacacttttaatattaaacactgaaaaaatgtgagctatgcatacattaagaaagattaataaaaccagaaaaataccattcaggacataggcatgggcaaagacttcatgactaaaacaccaaaagcaattgtaacaaaagccaaaattgacaaatgggatctaattaaactaaaaagcttctgcacagcaaaagaaactatcatcagagtgaacaggcaacctacaaaatgggagaaaatttttgcaagctacccatctgacaaaggtctaacatccagaatctacaaggaactgaaacgtatttacaagaaaaaaacaaccccatcaaaaagtgggcgaaggatatgaacagacacttctcaaaagaagacatttatgcagccaacaaacatatgaaaaaaagctcatcatcactggtcattagagaaatgcaaatcaaaactacaatgtgatatcatcttaggccagttagaatggagatcattaaaaagtcaggcaacagacgctggcaaggctgtggagaaagaggaatgcttttacactgttgctgggagtataaattatttcaaccattgtggaagacattgtggcgattcctcaaggatctagaaccagaaataccatttgacccagcaatcccattacagggtatatactcaaaggattataaatcactctactataaggacacatgcacaagtatgtttactgcagcactatttacaatagcaaagacttggaaccaacccaaatgctcatcaatgatagactggataaagaaaatgtggcatatatacaccatggaatactatgcagccataaaaaggatgagttcatgtcctttgcagggacatagatgaagccaccattctcagcaaactaacacaagaacagaaaaccaaacactgcatgttctcacttataagtgggagttgaacaatgagaacacatggacacaaggaggggaacatcacacaccagggcctatcagagggtggagggcaagggagggagagcattaggacaaatacctagtgcatgcagggctcaaaacctagatgaccagttgattggtgcagcaaaccaacatggtacatgcatacctatgtaacaaacctgcacattctgcacatgtatcccagagcttaaagtaaaaaaaaaataaaaataaaaataaaaaaacaagaaaccaagtaagataattacttacaccattctaggtgaatcagtgagtgactgcagttgcagtggtggtggtttccatcaaagaataaatgtctgcaaagcaaaaattgtaaggagcacctcctcctgccacgaagtttaaagataatcacgggccaggcccggtggctcatgcctgtaatcccagcactttgggaggccgagacaggtggatcatgtgaggtcaggagttcaagaacagcctggccaacatggtgaaaacccttctgtactaaaaatacaaaaattagctgggtgtggtggcgggtgactgtaacccagctactcgggaggctgaggcaggagaattgcttgaaccaaggaggccgagattgtgccactgtacaccagcctgggtgacagagtgagactttgtctcaaaaaagacaaaaacaaaaacaaaaacaaaataaaacaaagacaatcacaacaggacctgctcacctagtgctttcataccatgctgtttattgttgtgcatctgtatgactattgtagacttgaagatttgtatgttagaatcatttctattcattcattcattttcaggccacttatcctagttcagtggggtgggtggctggagaaaggcaggcaccagccctggccaggatgccagacagcccctggcaaggcacgctcacacacacccacactcactgacactaggactgtgaagacatgccagtgaacctaaagggcacatctttgggatgtgagaggaaactggagtcccagagaaaacccgcacagacttggggacaatgtacaggctccacacatggtggccccggatgggaattgggtttttttctcatcaaccttataacaaaacaaagttgaatgaaatgatgttatttgagcatctgctgtatgcttcttaattagcattctaaaaatccttttaaatgccttaaaatacaataactataaaagtaatcttcagttctcatctccagtaagttttcaaagtctgatgaatacgtatggtgatattaagtatgggaacaagaaagaaaaaataaaattgcattggttctcttaaataaagttaacaaatgacataaaccaggttagctggctagtactgaacactagcatttcactgtcggagaagaacactcaaatgaaacccagattgaaaataagttaagtgtttggggaatttacacatttgaaggtactgatagatactatgatttgacatgtattaaccttttcaactctgtacaattaaaaaacactgcaatcgaaaacctcattcatggataaagataagaatttgcacttattgttctatgtgattcacatttaagcccttattttttgaaaatgctcactaaaatataaagaagaaaaaactataaagatgttatgaaaatgtgaacggactatatggatgacaatgtgtagtccaatggcccacacacatacgaggccagtaaggttgttatctctcagctccaatcccacccttctaccctcttgttttgtgttgctggggctggactctctgcaaaccacctttcaaggacatactgctgttgaaagaagcacacctctatttgttttctcctctgcattcctcctgtaactcactaatcccacccgctcagtgccttctgcatgtggcagctgttcaaaggtactgagtacatctacatttgacgtacttgcgtcagtcctctagtgtagtgctgaagttctccaagtatctccaagaaactatgaaacctttgcataaaatattgacaaacgccccgtgaaaagatattgactgcagtatcagaacccgctttttactgttagggcagaagttataatctcacagacttttagatgcttgggctgctaacatgcccttcatcttctaggcatatggttctgcaaacaactttgtgatttctaatgacgtgcatcaaaatgaaacaggtaagtatcaaagggcgaagctgttcattctcaacaggagcttctggacttccagtattcctttacccatcaccccaaagcctccgggctcagaacagattctgaattaaggtggtctcttgtcccacctctgctagaaaatgaacacctccagagtcactgccaagtccacagattgtagtcacagggccctgcaacatagtggcaagctgttggccacagcttgcaggcaccagggtgcccttagcaggtagaagtggagccctttaggaagggcttttggtttcaccccaaaggattagcataatagcatttatgaacaattaatctcacagatataaaatgagatataaaagtgtggtatttctgtccctaaccgttcagatggctaaatgcaaaacgaaaacacaggactaccaagtcaactaacttatcttggctagacttattgtaggtttttctcagtgaatttctctagccctccatcgggctgacttttgttttgagtttattttgctacagcaagtaatgggatatattaatggcgcacctctacagttacacctggattgattttgccattggtgggcttcatttcatcactaatgatgaaatctttgctcttggaaacaaatgaaataacttataaaggaaacagtatgagctagaaaaaaaagcctgcctggtctgaagcagggaagatttgacctaggtccagctctgcaaatgacccaaataggtcactgaaaacaagttatctctttgttctctaccttccagtaggcagagaatggcaagtatgttttcatttgattgacatttgtgagcacaaggcttctcttgtcccaccatccggggtctgtacatgtgaggggctatcatgatgtgcatttcccaagtcagtgccctcaactcacaaatctcccaggaccacaactggaaatcatcccatccaggatgctcctgagtttctggaaaaccaaggaaaaaatgagttccctttatttgcctcaagtttgttccactataatgtcaggaaactggctgaggtctccaaaatttaaacaagtactacttacccccttcagataaacagaaaatgcaactctatgtaaatattccttaagaatattttgcagcacactggaattaaattagtgctaaagatgatgagagcaagaaagtaatctgctcagatgttacactgaaattgtctctaaattcattccttaagtccaaaccagaatctcaaacactgatctcttattacaaaggcactctatgttatgagtgtcttcaacaaatgccatgtaaagctgtcttgcataaaaactgtacatcctagattccagcccagcacccccacccattaagttataaaccaattttatttgctgaacaaatgttaatgccattctacgttaatggataatgctatgaaaagcacctaagtattacagcactggaacatttaaggataaaatagagtgtaacttggaaaactgcctgttacaaacatatgtcagccatgaagccttctagccctgatcgcccatcctcacagaactctgttttaatttctccctcagttaagagaattttgcaataacacacagatttattaggtcccaggaataaaactctcggagtaaggataaaaaataattatatgttagaacacaacgtaatattcaaatgacttgaaaacagtcacctcagcaaaaataaggagagaggaagaagttaaagatgaggttgataacactggctataaaacctctgaatttaagtgcataaatgcatgatctggcacttccgaatcataaacaggtagaaacgggaaacctcccattcacaatgaattgcctgactggtttcgttaatgagccagggggacgtcttcatctagtaagtcagtacaatgttaagagaggttgctgtgcaaggcgtcttcattagaatcccagctctaccacttgctagctgtgtgaccttgggcaagttgtgtttaacttctcttcacttcagtttcctcatctgtaaaatgggaatgttaccaatgcctacctcatgaagcagctgtgagggttaaatcacagcttagaactgtgcctcacacataatgcatcctcagtcaacgtcagctcttcatcacttggtggttgttattgtatgagggacgtattgcaattggaaagggagctgaagggaagttacagcctttcctcccaagaagtctctaaattcactgactgcattttctgttttctcgagtttggcttctgccccctctactccaccaaaagggcacttgcaaaggtcaccagcaacgtttctgtggtctaatccattgtgtggttttagatcctcatctttctcgtcctctcagaaactctgaacaccactgagcttgaatctcattccttggattccatgacttttcactgtcataattttcccttcacttttcttgtcactctctctcacttccacttgccagcggctattccttcccttagtctctaaaagtcagaatttagattctcaatgttcctcggtctccagtctctctccagaaaaatttacctatttctacggtgttattaccaatggcatgctaattaatccaaaatgttggtccaacacctcagacctctgctctgacctcctgacctccaatatgttgttctatgttctctgtgtttacttgaatgtcccaaaggcacgccaaactcaccatgctcaaaaatgaatttatgatttccgcccttcccgcaaaccaggatcttccctaatgtttcccatggccgtaagcgcaccaccaagcatctctgggctggactcctgcaatagcctcccactccctcttgcttctccttttcccggtggatccctctccatagcagccagagtggtgcatttaaactgctaatgtgatcacatcactctgctcaaatgctcagctgatccgcatcttataggatctacgacctagctctgtctgcctctcctgcttagctttatctacctgctcaccaactattctgcctttccctctccttggagccacaatcttggaggaagcctggtgtgtcacagatacacaataaatactatgggcggtaaccaagagtcctggtgcttgcgtttggaggtgaagaggggtagaggatcttggagaatgactaatgtcagtgaggcaggcatagacagaaagccattccaggaaacactgggaacactaatgcgatcccctaggagctccccaaataccaactactactactaacgccttaggctgacaagtagggagagagagtaaaaagctccaggctcaactagcgccaccatcatctctctttcctcctcgtccatcccacctcccctcctgactgctgctcataggctaggaagagtggaatttggagctcagttgcctcctaatccagccaccacctccactgccctctcgcacacacatgcagacttcagccttgcatatggacacaaatctgtgatccggtgggtccacgttctctctttgtttcaggcctcatccaaagagtgttgtggcacaggtgcagcactggcggtgggagggaggggaggactggggcgagaggggcatgaggctctcatcagctctctttagaaaacaataactataaagctgaatgagcttttgattgtgacactcagttttattcaaattgaattttgctttacctaaactctatccttttggtgtgtgaattactcaagtctttattcaaacttcaagccttgtatggagaacagaataggaaggtcaaaggatggatttcttccatatcctcagaagggccaagagagaataagaaggtagactttttctacttagggaaaccaaagaggggattggtgtgttctagtattatccttttgtggacataaacactataaccagttaaaggaagatggcttaaaaatggaatatgtgaactgcaaatatgaaagtatgttgaaagagaaaaataggaaaagttatatcagcatcttaggttgattgttctttaactggaaacaaagccccagaatagagacaatatagatataaaatatactatgtattttatttaacatatacttatataccagaaatgaagctgcctgttttgacaattgctttctctataaatctctgccagaaaaaaaatcattatgaattcaacaaatcacatctcaattagttattctggtcaacttgagacttagatttatttatgaaataatgctttccagaaagaaaaacatctggccttttaaaatagttgttaatgtaaaattttaacccaagtaattgtattactgtaactcactagcaattaaaaaaaagtgtgtaggatatccaaaagaaaggaccatattaaattaaaataaagtgtttttttttttacagtaaaattcataccatctggcctaatttgtcttggtgttttgcccagtgtagtatcagctttttgagaactataaattattaggtaactcccctgaaaaaatatgagtgaagaaaaaatatgggttgatgacgacatcctgattatatgtctgaatatttgggaaaacactgatgtggtggaacagcccaacctaagtcaatctgggcacgaaactggttcagggagggaacccacactagacacaacggtgatgaaaaggacgggctcacagagggtgacagggaaaataacatgtgaaacaatagagaaataacagttccagatcctgaacattacctctttgtcaagtgcttctgattccaattaagtttacaggaaaaataaccaggcaacccctgcctgactcaaaaaaatgtacagactattaaaggatgcttttaaatagcagggtgataaatggggcatccacatgtgagcaccagcatatttttcatctaaattctgttcttctgtcttccagctgatcactttaatagggtgtcacctcagcctgtgcagaggtgcccagagggggtgcagctcctagattgttaacagaagtgttgtttcaaaaacttatgtgactactctcagaaaaggtaaatgtcaaaccacagactatgggctcctttatcatggagccgcaggtttcctttctatttagagtctatgtcccacagattgataagactgtttaaagaataatcttacccggattatttcttcaacacagctgttggtttctccagatctactctcctgaaagcaaagaaaaaaaaattaagcctgatggaatagattgatgaccacacagaagacatgcaaggttccaaattagtcccccccaacaaaaaaattcagcgagttacaggttgaggggatgcctgacctgggactggcagacaggctcctttccctaacagccggctcccattgtggctgctgctcccccttctctggctggagcaccacacacgcaccccagaggctcaactgtggcccctccaaccaccctactttaagtggggtgggctcctaggggtacagaacgtgacctgcaggtatgagctccatccaccttgggtgccattaacgtgtggaaactgtggcctccgctacaacagtggatccaatttatccaccaaatatatgccgtgggcctaccaagtaccacaatggttgctacggcttaagtaaaagtctggtagttccaccgtcctcaaagccttggtttactggtttgataggcagaaaactgaaagaccaaaaagagaaacatcctctggatgttggactggcatgtggggcgtcacgctcaagtcacttgttctgtcactcagcctgccctgtgctgtgcagatgttccgaggtgcagtggcttcaggtcacagccgactctggggagcattttaagttccagagatgctgtgtgggtcctgctggctacacagccaagagtgcaggatgtgggtttgtggggacacagaagcagtggacgctggtgaaagtgcctacctgtggtctcagggagatcacttctcttcgtcctgcaattcaaggatgtcaacctgagagtagatgtcactgtgacatcctggaatgaggcttttctccacagtctcttctccaaggccactctcccttcctcctcactgttctctctctaccaagaatgctatctgcacctttcctggtttttctagttaatttcctagttaattcctagttaagtcatccttcgaacagcagcttatccacagcttcctccgagcagccaccctgaccctagagtgcttgcccccagcagcctccacttcttcaaagccctcaccacgacggcaattcaatagtgaagtctccagcaatatctcctccctctaaaacatcagctccctggattccagggctccctgtcttccagcaccgtgctccacacagcatggggcacccccaataactattggctggtggtaggtgtatgaataaatgaatgagtttacttcctgcagttctgaggggcatgaggctcatcagaatcagcactaggactttaaaaaatattatgaaggctctaccagtgaccgttccatcacactctccatgccctgtgtctgccagctcattccttgtcctggggtagagcatttcctttgaaacactctacccttcacttgagttaggcgccaggctgaaggaaggtatgtgaggcttgaaaaggtcacacacatgattgagaccttctcctacccagaattaggggatttatccaagtctcccacctgaggcccagaaagtttacacaacttgccgaaggccacacagagttaccatatggtaatctctgttttaacttttttttttgagaccgagtttcgctcttgttgcccaggctggagtgcaatggcgcgaccttggattactgcaacctctacctcctgggttcaggcgattcttctgcctcagcctctcgagtagctgggattacaggctcccaccaccatgcccagctaatttttgtatttttagtagagatggggtttcaccatcttggccaggctggtctcaaactcctgacttcaggtgatcccctcgcctcggcctcccaaagtgctgggattacaggcatgagccaccgtgcctggcctgttttaactttttgaggaactgtcaaattgttttccacattggctgtaccattttacattcccaccatcaatgcatgaggattctaatttctccacattttcaccaatacttgctattttactctactttataatagctatcctagtggataagaaatgatgtctcattgtggctttgatctgcattttcttttttttctttctttcttttttttttttgagacggagcctcgctctgtcacccaggctggagtgcagtggcgcgatattggctcactgcaagctccgcctcccaggttcaagtgattctctggcctcagtcacccgagtagctgaaactacaggcatgtatcaccatgcccggctaatttttttatttttagtagagttggggtttcactatgttagccaggctggtcttgaactcctgaccttgtgatctgtccgcctcagcctcccaaagtgctgggattacaggcgtgagccaccagatctgcattttcttaatgactaatgatgctgagcatcttgtgtttactgaacatttgtttatcttctttggagaaatgtttattcaagcactttgcccatgttgtaattgggttgcctttttattgttttattataggagtgctttgtatattctggatatcagaagactcttagcagatatatgatttacaaatattttgttccattctttgggttgttttttcacgctcttggtagtgttcatggatgcacaaaactttaattttgatgaagtccaatttacccgtttttttcttctgctgtttgagcttttgagtatcatatctaagaaaccattgctaaattcaagccatgaaaatttccctttatgtttgttttctttcaagagttttacagacagttttagctcttttgtataggtctttgatacaatcgtctgggaacttttaggtgaagtttattttcttgtggattatttggtgaattttcgttaaaacaggaatgttatctttttgcttcattctagtctcatcattaaaagaccaacaacaaaatgtgcaaggcacagccactgctactagtagtgcatgaagacaacatgcactacttggcttatccttataagccaagaaaaatagtgttcaatatcatgacaccaatgctttcactaatacttcacaccctttcctatactcatccttccttctgttttcccaaaagcttcagttggccacatacttattacaagctttcactcccattcccaattccttaccacaggactgctctggaaacatcaccattctgacactctgatacaactggatcagagagctcttttggaacctgatccttttccagggaagcctgaggtgaccatcacaaaggttatataggaaagtctcagtcgggccggggggcttgatggtcacttggaaggatttcctttggcgttcatggtgggaatgagtggtctgaattagaaaatgtaccgtcaaacctacagaatatcattaatcatgactcttatcctacttctaagtcccaaccatttcctactgcataatatgctggcagggcaaatgctgaattctcaatgtgctttctgttttctaccacaaaacaattaatcaagaaaaacttgacctcaggtcctcctggtggaatcacccagatataacagcacactacaaatactcttaaaattaaacttcgggtttaattccttaaagctaagcttccctgaatatcacactttaatttcctttgatgtagtttatataaatgacaggttgcttttataactatctcccttataatcctatacatttcaactattctactctgataaggaaatgcgctgagagagaaatgcaggatagatgccctattagatacttctctcatcactggagacatagatgtaggatctttacactaagtcatctctaaggcagctccaaccagaagccttgatggtctggacagacatcaggtcattccctactaggaaggccctttgtaaagctaaggaggcggcagaggtgaggccagggtgagggacttctaacaacagtctcaggaagtcctggccttaaattacagcatggacagtctttggcagaggaacctcttgagtcttttcagaacactgagaaatgttctggggactcaagaagagtaccacattggtttgaatctccaggaccccatttagattggagtgaatccatgggccacagtatcgtagaaaatctgaatgggaaagaactttggagctcctttcagcccaagtcaatgactttaacagatggagatgccatggctcagagaagtgaagggctctgtccaaaaatcattctgacagcaagacacagttgaggcagaatccactcacatttcaacaccagctcattgagttctctactatctcatgctgtcttcctgcagctcaatccctagagctggctcatgctgaggtaacttgcatgctcacagtatgaaaataaaagaatgcagatagtattggggtaaatttcctcctccttttccacgtggcacattactcagcgcttgatcattgcctctcactagctaatctccaacactacacgtgtagaccaaagggggaagagaggagaggggaagtagagagaaaaagtcaaatctactaccccttctgtgacattaaaaaataaggggtaagggtttgtgtccttagaagtaggaggatggaattccaccttatcttttccaaattacagaaagcgtaggtagataggtagggttggggttgggggatctggggtacgtttaccttcttgaggtctttctcaaatctggtttcagctgcagttgtgtgcttactttgattatatttacattttgaaaactttccatgtttatcaacaagattaaaatatgcatgtaatttacatctccaaattcgtgtttatatttttcacaataaagttattgctttccttggaaaggtacccactgagaaggaaggctgcacaatgcacattttaattactctgtattttttgacggtttgtagctgttgtttcatgctgagttgctgagctgttgctccgtatttactccaactttgaggaacccacctcattttcctatcattacattttgaaatctgtcataacagtctcacctcattgaacctccaactaaacttcaattaagagctagcaaccccagctgattctcctcttctacagcactgtctagcatgtgatttccctaaatcctaccatttaaatgtacatgccgcacactgccaagaaatgtacagaactatgctgtgggtaagtgtagctcggggaatagccaggagcatcccatccctgatggtggaagtccctaattaccatgccaagcacagaatatggggagaagcagggcttaaggaaaaagagtgtgatcaaatcagtgggaaatggtatttcattgcagagatgggctgcacaagtcctcatttttgaaaatagtttaactctttatcacacacatttcaggtggaacttgcattctaaaatactactactttcaaatcacaatgcctttgtttatcttcaagcactcaaaagaccctcaagcatttagaaattgtgtatcccatgtacactcttaaacactcctgcagaaatatttttaaatcaatctattcttgatttatcacaaacctgacatacaaaaagttaggtatgctgtcaataccacaaaagcattggtgagaatctgagctcagatgcagggaccatcataattccatgggaagtccatccctacaactgtgtctcctgccttatctttaaggatagggccacctgtgaacagaggcagacagccagttctctcccaaattcagcctgtctcacacctaacctgtaccatcccctgtcaggggcttcactctgctcccaatccccaagctagaagcccagctgcctctgagcctcctctgatcctcctgtctccaccatcatctatatatgtagatgaggaaaatgcaaaggaaaaatacacaaacagccagggctttaacagagcatcaaaatgagatatgctaggaaaaaggaagagaaatataattattatagttagaagtatttaatccatccctatttttcctaacagacaaaggatacaaaagctcagcttcaatactcaattttagggtccttttaatgtattgtatcaccaagggaaaataagtcaactgtatttatatcagcttacagagtgtttatcataaatccagaaaaactgaaactcactgttattttaaaatcgttaataattatattagttgactataaactaaacagtcaaatctcaatagctcttctgtgtagcagtaaacaatttaaaaatatttaaaaatcccatccataatttaagaaaaataaataaggataacctcaacaagaaatgtttgagatttgtttttaaaacttcagagttagccaggtgtgatggtgtctgtagtctcagctactctggaggctgaggcaggagaatcacttgaacccgggaggtggaggttgcagtgagccaagagtgcaccactgcactccagcctggatgacacagtgagactccatctcaaaaacaagaacaacaacaaccaaaaagaccaaacaaaaaaaaggaaaataaaaaacttctgcgttttactgaaagatacaaaaaaagacctgaaagggactgagctagacttctcagatacctcccaattctggtatatgatataaagccaaatcaatgtacgaagaggagcaaaccacaaactacattaattttaaaaaaattattgaggcaaaattcaagtaacataaaatctaccattttaaagtaaacaattcaggggcatttcgtacattcacaatgttgtaaaccattatcacctctatttggctctgtaatatttccactgtttcaaagtaaaaccctgtaaccaatgcgtaatttctccccattccccatcaatacgagaactattttttcttttctttttttttttttttttttttgagacagagtcttgctctgtctcccaggctagagcacagtggcgccatctcggctcactgcaacctctgcctcccgggttcaagtgattctcctgcctcagcctcctgagcagttgggattacaggcatgcaccaccacaccctaatttttgtatttttagtagagatgatgtttcaccatgttggccaggctggtctcaaactcctgacctcaggtgatctgcccacctcggcctcccaaagtgctgggattacaggcatgagccagcatgcctggcttactttttacaatgattttactgtattaaaacattttacactgcactgaaaagaagaacatgagaaaatgttcatgggtaccatttgcttgtactggtagattttccagtggatgtgctgcctctcatttacgtgtttctgaccagttcctagcagagaactcagtacaacagagcaggcattcgattatatttgttgaatgaataaattaatgaccaatacactaaaaaaaaaaagactatttacaaaatgaaagtcctaaactttataagaataatgccggttatctacattacaaagaaatgtctttgctttatccaaaaactactacaacagcagcaaaccaccaatgttctaaattcttagaacatcaacatttatttacttcattaaaattaggcttatatccattaagtacagaaaccattaacaagtcatttgacttccctaattcccacattggtacctgtaaattagagagtaagtatcagtcttctattagcagacaatattgttaaagagctaataattttctgtcagatatttagcactaggacaaggtatttcaattatgttattatttttatgaacagaaattagcgatctgaatcagagcctatagttaaaagcatatttggttttcagaaagttaagtggtctgtcagtgtgctgacgatgtcaagaacctattgatggcatgaagagatgggagatgagaagcagacagtgatttcatatcctgatgactaattgatattgagtgcttatccatggggtcatgtctcaaaaaagtaccacagtactgtctactggggtcgtctttcacactgctctgtcaacactgggtgaagaaaccatgttacagggcttcccacttgcaacttgacattgataagaatactttaagatttctgtgttctttcacctaaaaccctacgtcgttaattttaccaagaagaagatcacacaggttcaggcaggagtgacaatgctgaagtcatttaatcctcacattacaggcaaacttcagtgagattttgcaaatgtaccatttcctcttgaacattttcctgaatctttattttaattaaattaattaattaatttctttattttgagacggagtcttgctctgttgcctaggctggagtgcagtggtgcgatctcagctcactgcaagctccacctcctgggttcacaccattctcctgcctcagcctcccgagtagctgggactacaggtgcccaccatcacacccggctaattttttgtatttttagtagagacggggtttcaccacgttagccaggatggtctcgatctcctgacctcgtgatccacctgcctcagcctcccaaagtgctgggattacaggcgtgagccaccatactcagcctatgtatttacttttgagacggagtttggctcttgttgcccaggctggagtgcaacggggtgatcttggctcactgcaacctccaccttccaggttcaagtgattctcctgtcccagcctcccgagtagctgggattataggcacccaccaccatgcctggttagtttttgtatttttagtagagacaaggtttcaccatgttggccaggttggtctcgaactcctgacctcaggtgatctgcccgccttggcctcccaaagtgctgggattataggcgtgagccactgcgcctggccgaacattttcctgaatctttatacaattccatttatatgatctaatattctttttttaagggatggcaggaaatgtacacgaaaacacatctgattatcacttatagtcagttttctaatcataaaattctgaacacaaaagcttgcaagacaaacagagtaatctaatgtggctgaagaaactaaccacttaaagatcctacttagcaccactctaatttgtgtcccacagtaagatggataatcaattcccttttagccatgaatggaaatgaccattgtaaatggcaaaagtgctgctgcgtatttgacgatattctatttggcacattctattaattttatttaagcattttgctaaaagagcagactcacaaatcacccttcctatgtcatgttctttatggatctttctctccattatcatctgaccttccccacggggtctcagctcttcctgaccctcagaacagggttcattctgcatactcaacatcagccatttctatgtatgctctctgaggtgatacgctagaaataaatgctgaataaataaatacagctaaaatcagccagagcacaggagagaaggcttatctgagaggtgggagcaggtagcactggaaaacatgagtgagaaactggcactttttttgttggctgctgaggaatttttcaatactccaagttttatatttttaaatcgatctacctacaacaccctattttaaatttatgaacatttatagcattttcattctttttgagacagagtttcgctcgttggccaggctggagtgcaatggcgctatcttggctcactgcaacctccgcctcctgggttccagcaattctcccgcctcagcctccagagtagctgggattacaggcacctgccaccacgcccagataatttttgtattttcaggagaaacggggtttcgccatgttggccaggctggtctcgaactcctgacctttagttcgtgcctgtaatcccagcactttgggaggctgaggtgggtgcattttcattctttattctactggtgttgctttactgttagtcttggaaaatatttgcaggatatgaagagagctattatagtggcaatctattttatcttttcccttctactcccataaaatgttcagagccttgaaaaacaaggtgcgtgtcccagtaaaaggcagagtgagtccttctgcttgtagaacttggggtatctggggctgaactcagatattaatcctcacatgtgtcccctctcgtttttcagagctggcttcagaacgtctcagcagtgactgctgaccactgaattttcacgtaaaacatcaccagataaagttagccccgggtgatcctgctcagcaactcagaagggaagggagcttcagaactgctttctatcctcattctaaagcctctgggtgggacccaaggtgaagacaatctctctgtatcttgacgcccacactattattataaaactccatggtattgtaatctaaagggagaacaaacagttgtacaaaacaaaagggtcaataagaaatagacatcagaggctgggtgcggtggctcatgcctgtaatcctggcacttcaggaggccaacgtggggggatcacctgaggtcaggagttcaagaccctgtctctactaaaattagcagggcatggtggtgtgtgccggtaatcccagctacttgggaggctgaggtgggagaatcgcttgaacttgggaggcagaggttactgtgagccaaggtcatgccactgcactccagcctgagcaacagagccagactctgcctcaaaaaaataaaaataaaaataaaataaataaatgaaatgaaaatataaaaaaagacatcacatgtaaaatatgctgagattattctggcatgattctatctggacagaatgcagatattcctgcttcaatgccacctaacactgtgtatgagatccgccacgtacagggaaaagctgcaaagaaaaccatgtgcttaggccactttttggcttcacaacctttggcttctctcaagagaatattagagtatagaattgatcataaagcaaatttctgcaccaagaatttacctttccaatggagaaaagtttgtgtttactgaatataaaataaattaattaaaaaggcttgtaatccaactaaaagacatccaagatgatgttggaacaatctaacaaaaaatgatcattttgtgataaacacccataagagcagtcaaattaagtcagtaagtataaacgaaaaattgtcatggttattttctatctaacgccatgacttaaaggcttacagaaaaataaaataaaaaatcattcagttatctctcgaatctcctctccaacataatcacgctaaggaataatatgcttaattatggacttgatttctagcactgggaaagtagatggtttttagaaactacttccattaggctaaaaaaagaggacactcggaaacctagcagtagtaaaggagtaaatgatacagactacttaatgtaacatgcaaccaaatgggggacttggaagatgtgccaggtagtctaaagagtgaatgtaagaaaagactggctactgcttaggtaaatggtgtagtgtgaaatggtacaaaatcaatggatgacagagaaaagcatgattccacttctacctcacttctgcctgcacaccataaaccatcctcaaagttacaagcagaacaaattaagagaggactcaccccagttagatggcaatagtaagagaatgttttaaccactttacatggcagccccagggaaaacagcacccatggcattggagggactggcagatacagtcacagaacaactctctaaaagaaaccacagccagaaaaagcaaatgtcctagctcttccctaagataggatcctcaaattgcagactaatttgttgctgggtcctcaaaatcaccagaggttgtgtggcgcagtaggcaggaacatggacctttgcaaacccaattctgccattagttacatatgtccctgcggtgggggcgtcatctgatttctctagaccatacgtttttcatttgtagaaccgagacagtaacagcacctacgaaatgtgagggctaaaaatgaggcaacgcatataaagcatttacaaggtgcctactacacaacagctgatcagtatataaatacgattattttattttagaattacataaaaagtattttcgtatttagaaaagaaagcaatgattactaggaggcaacaagagttcacaagaaccagatgatgttatctctaccattctcctctggtttttaaatataatgtgtttagatttctgcaagattgatttcccagtgggtagaaggaaatgatggattggttgctcatatagctggacggactggtagctaattgaacagccatgcctaaggagtattgttcaacaaatacttcattgtgcttactatgtgttcagcatgtcctatatgctaaggattcataagtgaataagacagacaaaaattcctgtcctcatggagtttatattgtaatgagatgaggcagtaaaataataaataaattataaagtatagtagaatatggaatgttatagggaaaagttagaccagggtaagggtatgggactgtgggatggggctttatgcttgtaatctgtctgttaaataagcatgctatctgacatccaaaacacagtataagccccaggctgttagcctcctcccctcttcctacttataaacctgtagtattttttccttccactatgagaacttcattactctgagtcataattgtgtgtttaatgtttacctttgtcgctaagctgaaagctccagagtctagggagaatggcaagaccaaggaagggtctcagcatttgaggaatggctgcagaaagtgtcacgggaaggagaatcaaatggaccacactggatgcctcgtgtttttaaaggacattgttattaatgggacagggttcatactcattctgggtcattccagacacgggagtttgaactaatgggggaaagtccagggactagtccagcttcccaaaagttctttttcacagttagaataatctacaaagaaagtaagcatgattgatttcatgttcaatcagaagttaaatgattaagtggaagttacttattaacctacacttctaaaatgtaagattctaactttaagactataattctggtcatttccaacaattttattaataaaacgttgaatggtaaatttctgtattttctgggttagtgtagtagtaagtctatgacttctttgttaagaaaacccatacagagaatacaaagattatttattctaaaagtaccaatctaaaattatgaaataagagtcattatagcagctaacaaattaaatggattaattgggtagagatttgagagattataattaatgataaatcaataaagtattcaacatgaaaatctattacaaccctgtttatgttatttaacttcaagcattcagttctgtatgcttctaattagcaagctataaaagatgccatccataaaaacataatgagaagaactgtttataatgataattaagattcatttgctcagagagaagggttcacacggctacaggttgcagcaaacaaagggttaagctcattattgaggaaaatactacatttaggcagcatttattagacatttaaccctatcaggcagagccttgccttagaaaatacatcataaataatgcttcttacaagacaggcaagattttccaaagtgaggtagcaactactgggagtccatgacattctgtaactttgctgggcttgactcatccaactgtgttagtaataattaaactctagctgatggcttttatgttctctttctggtttctcaagtcttccctgcattgatgttttattaaaaatatattgtgtattgtgaaggccagtggagaaaaaattttacattttccctttccgcctctgggctggagtttgccttctatagcactttgtctcatactccgagcactgtttgaggcttctcatgggcttgccagtggcaaaattgaggctcagaggtgggaaacataaacccataatacaaagaccctcactttttagatccttttgtaattctggctttagaaaaatcaaagttttcattcagcagagaagaagcttcttccccctttcacagaaactctaatatctataaagacccactcagtgaagcccaaaatgctttctagacacataattgtagcaataaaagtgtgtcttcacctcccactgtacctctgagctgatagatacaatttgttactccattgacaacctgccaacacttcacaataattagagccaatggtccttttctagatatagcataatgtaaccttcaatattaacgtttttttcccccatcagtgcaggcctaagacagaacaactctaagactagtcctagcctgaagtcacagagacctttaatgcaggtcacgggcaggacagcaatgatcaagggtaaactctaacacatgaactggtaacccagcagtcagccactgtgtggcctgctacattaaccgccctctgagccaagcaggcaccccagcggtcctcatttaaaaagaaaaaaatataagaatcttaatagagagattggggggcttatttttcatgatcatgtgcctttaaaaggaaagtcctagagtcagccctgatcaatacagcctctcctgcttcctgctttcaatctgttaagcaagaaaatgctttcatgttggcactaatcccactgtgcccccaaagaagagaaaaaaacctcccgagagactatttaatatccacacagtcggtttttagaaaaacaaaacaaaacaaaaaacccaaggaaatgaagactatcaggagaacactcccggaaaaaccctcctgaaaacatgcctgagtaaaagaaaagtcaaaagactagatagagaaatgatgtccagggagctcataatctgcctgtgcaagaattctagtttctagaaagtcactgattaataaattcatgtgctcattcatccattcacagataactgctgggcaccaatgctgtgccagtaccagggataccatagcgagcaaaacccgtagggcctacctctcagggagcttgcacattctacgggggagcaggcaaaaaacaaacataacaattttagatagtgacaagtacttgcaaacaaagtaaatagtgtgatgtaaaaaggctggtctgatcattacgattcctttcagcatgaaacttccctcatatcacaaggtataatgaggacttttagtcctttggatggaagtcctaagatgagagactatattaatcataataggtgtaaaagacaaaaatacaacaacgtaaatttcaaatgaagaagcaatatgcaatctcaatttctaccatatccccaagacccttggaagaacctatttatagctttatcgcagccattttgaaaaggtagagaaaaaaacatcacaggtttttgaaaagaaattttgcaaataacatggcagtattgcaaaatgcaaatggaaatgctgctgagccatctgctcaatattacagcaacattgggaaaaggctctgaaagaaatgatgtttgaaatcattaaaaaaataacatgtcaagtttaaaatactcaagaatcttaaaaccagcatcaacacattcagcaaccatatggccctacagcaggttaaaaaaataatcgccctgcttgcaatttctacttcaacccaatggtttctaaaacatgtttctttttcccatttgagtaccttttctttccattgaattccttggtgtttacagttacttgaattatacctggagcataatttttgtttcaccctttctgaagtagaaataagatagtaaggaagattaaaagtcacctgttcaagaaaaaggaatgtgcagatgactctatataaattgttgaacacatcttgttttaggtttattgatttctccatcctgatctcactgtctcagtaataactgctaatctcatcgagtatcgtaattttccaggcactctgctaagtgctttatagtcattatatcatttaatcaccacaaatttataaagttgatgctgttattatctacattttctagatgcgaaatttcctcaaggtcatacaggtaacatgcggcagagccagagtccaaacaactgtgggagccacgtctgtgctcttaactgctattatatgcaacaattcagtgttcagatgtttgtgctgacttctcaaggttaaaaaatgggcaacatagcaagatcccatctctgcaaaaacattgtaattttttaaattacaaaatttatgaaggcccagagaattacaaatttataatggaaatccttggtgtttcaaatgaattaaaaaagtagtttcattcaacttactagcttcacatagtagcttgtggatacagtaggaactcaatacatgattactgatagcagtattaattcacatataaaaatattacatcaaatgatctgtgtctggtgcatgtattttaaatgctaaagttccttttgtatctggatcataagaagactttttaaaattacaaataatatttaaaggtgatgattagtttagaacggacctgagggaagtcaggcagtaggaatatctgccaaacacttaagttctctaaatgtagagatataaatgaagttataaatgtaacactatctatagcaaaaaaaaaaaaaaaaaggaatagatgagcgttactgatgtgcatggcctcatgcaatggtctcagtgcagaactttatttggtcttatgaaacactttaccaaaactttcacttggcattcctctgtctgttgcttttgcctaatgatcttatctcttcactgattagcaatctcgtctgtctttagcaaccctttaaatctcatgcagccaaaagttataaataaaacaaagcaaataaacaacgtgggtaaaataaatcagtgtgataagcagttgtgaaattacaaacttattacggaaaaatccatgtaaacaaatccactaaacacatagtcattaattacagctcacaacctcccatcacttctgccttctgttctctaacgtggggtgcttggtaaatctctggtctagagtggcattttatttttgcaatccttggctgtaggtagagcttggcctcttttccactcaacaggaagtcttgaaaacaaagatgctaaggtttagagtattataactggaaatatgaaaggcattttgcaatattaccaaaaacttgaaatgaaggttaagaaatagatctgcatataatgatccatttatttttgatgaaaatgatttgtcaaaaggtaactcagtgaggaaaaggtaatggttttaaaaatggttctagaacaactggctacccatatgcaaatagatgaaccttgaaccttgccccatagcacataattaaatcgtcccaaactggatctcagacctaaatataagagccaaaatacaaaatttctagaagagtaaacatcggtgaaaatctcaatgattttggggttacgaaaatatttcctaaataagacacaaaaacacaaactacaaaaaaatcgttaaaattaaatacttttcttcttcaaaaaactgtgaaaaaatgaagatataaagggtaaagggtttcttttgggtgtgatggaaatgtttgaaaattggttgtggtgatggttgcataagtctgaatacagtaaaaactgaattgtacattttgaattagcaaatggtatgatgtgtgagttatgtcttataaagctgttacaaaaaaattaagagaatacacagtctggaagaaaatatttgcaaaacatatatttggcagaaggtttgtaaccagactttacaactcttagagctcactaagaagacaatcacctcaataaaatgagagcaaaaaaaataccttgatggagtatgtcaaaaggacagatagccaatagaaagaacttctaatggctaaagctagaacaagaaaagaattaaacaaagtagcattggattataaggtgaagtattaaaaaaattttcatgatcccatattgatataaatgaatgcccaaataaataaataggataggataaatatcttgcgcataagaattaaaataatttacgtagctactctgccctcaagaaggtggagcgtaactccccagtccttaagtctgagctgccaatggtgacttctttccaaagagtatagcatggaaggagggaaaaaggataattctggagtggagaaacctgtcaaacactgtctctgccaagtgattaaggttaatgtcaactgtgctaagtcatattgatagtatgtagacctgatatgatatgattagactggcactttgcctgtgtggtcttcctccctaaaactcataatcccagtctaaacataagaaaaacatcatacaaatccaaattgaggggtagtctataaatgtcagaccaatatgccttaaaactcaaggtcatcaaaaataagggaagtctgaaaaactgtcacagtctatggaagtctaagaagatatgacaacgaaatgtgtggtattctagatgaaattcaagagtaagaaagacattaagtaaaaactaagcaaatctgaataaaatattgactttacttaataataatgtatcaatatttgttcctttgttgtaataaatatacaatactaatataagatgttaacaatatgatttaaacaagaaccagaattttattacacaatattcaaaatgtccaagatataatccaaaattactaggcatacaaagaaccgggaaaatatgaactcacatggggagagacaacagatgccaacagtgagatcatccagatactgaagttatcaaattcattgaattgtccatttaaaattggtgaattttattacacataattatgcctccaaacaaaaggaacaaaacagcagcaaaagttttaaaaagagtacagataacattgaagcattacattagtattagtttagcttgagagtgagataaattgattcttatggactattctggaaccaaataactactattcacaccattatttcttagataaattacgttttaagtttcaaacaatcagcttacaaaaaaccttctggcgcctaatcctttcttaagtggatggccaagcatttcagaaaatgttgaactccagagaccccatttaaacccaggaacatgagacttctgattatttgggtattaaattatatataagtatgttaatgttattcatatctctcaaaggattttggagacagtttggaagaaaggattttagaaaactctctaaaatgatgactcggctgacatggggcatataggagagaactattaaactttctcccttcctctggcattgaaattactgttagaaatgaatgagttctgcttttatagagtactactcattaagttcctcggtcctttcctagaaagaaccacagagacaaatagtgttctaatttttatctttactttttactaaactatttgcataggtacataggtttcaagaagattgctcaaatgaatatttattttcttacagagaaacatctgtgaaactgatcatctttcactctaaataaataaataatcataattggtatctgtttgagagctcatttgcaaactgttcctataattgtgccactcatttacaggcacaacagagagaatcagaacataatcctgcaccctacttatttgcattaattgtgatcaattgtcacagtttgtttataagactgaataatttttaattctaaaataattatgctgattatcaaatgattctgtatgatttagtttttagaacatgtttaatacaatcattgcattctcagatgtttaactacagggctgtttatttcactgtatttgctttacgtccaagaactgagaggtttttccaagtcattctgtcaagagttcattagaaaaataaactaaagtgaatatatgctgtgctttttaggtgtaataaacattaagatataggaatgtaacattggagctcatacacacacaaatcccagcttgcagcagatcaacttcctgtgtctgatggtgaaggatcccactcatccttcaaccctactcaattcaaccttggtcctaaaaataattaatcattctcttttatattcttccaaagtactttgtgtctccattgtcacatttttccttgactacctttaagttagggaagtccttctcctcaaattgaccttaaacccatggaattcaagatctcattaatgacttttttcccctgacataaactaaagaaaaatagctggtttaccacattatactggattcctgttcagaaaataattcactcccctcctcctcccactgtggatggaatatcctcccctaccccttgagtttggttggtcaactaacttgctttgaccaatgggatggactggacatgacagcagctgaggcttaaaatgtgcttgctcagcagggctcaccagcctgaactcccaccatcatcatgaaaaggacatgccccaggtagcatatggttgaaggaggactgacttgcagatcagatctgaattcaaccttcaacatggagctgggcccaaccagttccagcctgggctggcaggcccacaacggaagcaaagtgaataaataattgctgttttggcagggcgtggtggctcatgcctgtaataccagcactttgggaggctgaggggggcggattgcttgagcccaggagttggagaccagcctgagcaatgtggcgaaaccctgtttctacaaaaaaaaaaaaaaaaaaattagctgggcatggtggcatgcacctgtagttctagctactctggagactgaggtgggaggactgcctaagcccaggaggtcgaggctgcagtgagccacaatctccccactgcactccagcccaggcaacagagtgagaccttgtcttaagaaaaaaaatgcagccacaaaaaagaacgagatcatgttctgtgcagggacatggatggggctggaggccattatccttagcaaactaacacaggaacagaaaaccaaatactgcacgttctcacttataagtgggagctaaatgatgagaacacatggacacatagaggggaaaaacagtcactggggacttttggagagtggagggtgggaggagggagaggatcaggaaaaataactaaagggtataggcttaatacctggttgatgaaataaactgtacaacaaacccccatgacacaagtttgcctgtgtaataaacctgcacttgtacccctgaacttaaaagttaaataaaaaagaaaacaaatgttgttctaagccccagaattttggtgtggtttgatcttcagtaatagctgaccgatacacctgctttataaacatggaactttattctccatgaatatggcttggttaaatcacattttggaagaactgccaaaataaagcagctccgcttctcctgtcataagcacagtgctaaattgagtttggatggctttcctctaatagaattattttacacttgcccacatcaaagctaatgtttctccttgctgcccactcagtctttcaagattttcctgtgagttatcctcagcactctggtgcactactcttcagaatagctggagctatctgcagacatgccactctaccctgccttctagaaccacatcctttttagcatggaatttctttttcttttgagagtggtctgggaaccaccggcggcacaagcatttagaactgctgttaaaattaccaattgctgggcccactccagacctactgagtcagaatccctggggtgggatccaagattttacatttttaaccagctccctaggaaattcttatattacaaccaggtttgcgaaaccctgatttatgaatatgctaactaaccagatcctaagccaatacctaatcctagaggatttcgatgattatccaccatcatctagaaatgcatttgtttattcctaatttttgttttctatgtgttcattttctgtctacttcaacacgttttcttctcttcatttttcatcacatgaaaggtcaattttttaaaaaagtactcttggtacagaatattttcaaagcctttgtctgaacaagagaagaagttgcaaaattctgagcaagcaccaggaaaaatcatctttgatcagttggttgtaacctacaacatgctacagaagggccagacgaaaccgggagcttaggcctgggggtgatcagccaggaacacccagtcctagcagaccaggctcctagaactttcagccaataaagcttatggtcgccccccgcaaaaaaggataacctaaataagttatttcagtggttattctttactaagaaatgcatatattctctcaaaaatgtgatacttgggttagtcaggtattttccatatagaaaccacactctccgttcctcaaagtgttgtccttgcacttttaactttttaaacttattaacaaatttttatattaaaatatttaattgtggctgggcacagtggcttacacctgaaatctcagcactctgggaggctgaggcgggaggatcacctgaggtcaggaattaaagaccagcctggtcaacatggtgaaaccctgtctctactaaaaatacaaaaattagcagctgggcatggtgctcatgcctgtaatcccagcactctgggaggccgaggtgggcagatcacgaggtcaggagattgagaccatcctggctaacatggtgaaaccccgtctctactaaaaatacaaaaaaactagccaggggtggtggcgggtgcctgtagccccagctacttaggaggctgaggcaggagaatagggtgaacctgggaggcagagcttgcagtgagccgagatggtgccactgcactccagccagggcgacagagtgagactctgtctcaaaaaacaaaaaacaaacaaaaaaattagccaggcgtggtggtgtgcgcctgtaatcctagctactcaggaggctgaggtaggagaatggcttgaacccaggaggtagaggttacagtaagctgagaccacatcattgcctagcctgggcaacaagagtaaaactccgtctcaagaaaaaaaaaaaaattaaattgacagataaaagtagtgtatataattcaaggtatacaatgtgatcacctgacatatgtatatattgtgtaaagatgatcacaataaaattaacgtgtctgtcactacccatagttatcatgttctgtgagtttgtatacatgtacagttaagacacttaaaatctgctctctcatcaaatttcaagtaagcagtgcagcattatgaatagtcaccatgctgtacactaggtccccagaacgtatccatcttataactgaaagtttgtacccttaaccaacagctccccctttgaatttagtgattctctcctttgtggagagaatcagagggcttcagatggaagtgactcacaaatccaaattctttaggtttcttatggaaagaaatcatactggtaacagaccagattttcagcaatgttgccagttaaatgatgggttttggtcaacagctccaaaattgatgttgccactgactctgtttcatgtgcagcttccaacattgccaattcaaaagatatgttgatcctttcaatgtaagaactcatgcaaacttacatgtaggctctttctatggtaatacgatatggggagtagagaagtggccaagaacaagggctttagagccaaactacctggatttgatcctggtcactctctgtgtttcagtttcccccactacataaatgagggtaataacctaccacacagacctgtgtataagatgggttatacacttaaaataaatggttaaataatgtctcatgcactagaagaggccaagacttgaaagttgttatcattcttctgaaattctggagtgtattcttggcactgttataaagctttggttgagctgctctgtacttaaccacttcctctttttgttttcttatcttgaaacgcatcatacataacaaaagaatggacataattaatgtatatgtaccttgtagagaataacagtaaaataaatatttgtgtacccaaacagcgtaaggtacaaagttataacaataaatgtccagagccactgtgctcttcaattatctcatcaaacccccttcaccatcctaattggtgtttttgtcattcttttgcttttctttatagttttactatatatttgttcatcactatttttaaagaaactttgcaagttgctcaaaaattctcttatggcctattttcttgtttacactccccatctgccaccttttttaggcttccctgctctcctcaaccagggaactgctgcagatttagaaagatgttttagtctccacattggccaaactgcttttcttcactgattagtttttgaagtcttcccccacacttcccccacccttccccaagacctcatcattgtgatcctgggtagctaatgataaatgattttaaagtttccaggttttcttttaatatctatacttcctattttttttcctaaaagctgaattttactgcattttctcttaaatctgtcaaaacacggggtagagttctctggttttgctgaattcactggaatggtccagcttccggccagggactgtcctctgcagcacactatttcatccatagataatgtccggggtgttttctacttactggggccaaaatgtgctgaactttttgggttctgagtttcatgtttcagaaacaatcatatgacctacgtacatgccttactccagccaagaggacttttctcaaaccctggatcactaaaattccattttcacagccttatctaatttttcaggtgcatttacagataatgccccacatcactaggtctggcccagtgccccacggtgtggtcctgatgttggcccaaattactgaggaaagggaatttccacattcctagcttgttcctttatgctcttcatcctgtgtaagaaccagtgtaaaacaatattttacaaacataaaagggacctttgaaacttatttgatgtgttagcctgccaaaggcaaagtcatcacgaagtggaccgaatgaggttgtggttaaacttcctcaattttctcttctaaattaaaatctagtgccagacaccaaaaggtttcctcttcctgtccctcttttattaagtagttacaatggcaattaaaaagacccctttggtcattccacactactctctactccaaccacttcctataatctaatgatgctatcttggcaaactaatattataaagattttttattaaaataaataggttttagaagaaacactcaatcaagtatctcagtggatgtgtttcctgcaaaggcaatggcagcacagaaattaaaaactaattcatccttctagacagctgcccaccttgctcaataaagactctactattcattccttatggccattgatttttgcaagtaataacagaggttgagaagaaaagcgtaagcttttttacagatggatgtttctatcatttgccaacagcttctgcattgtctatgtaatggggaaaatgtaaaaatttatcttgtgctaaaaggataactatttcagagtaaaagtaatgcttttgggcaataaagataactatttcagtgtattatattttcttttgggctatgaagtcagatgatgactgatttaaaccacacaaatatcaacagttagactattctatttgtctcctctttaagaaaaaaaaaagtttcagagaagagtttgcataatcccaaccctaactcttcagccactatataaagtatcttaaataactatgacttagagatactggaaaaatatttggattcctctgatttatgatttttacatgcaatgttatagagaacacttcaaaaaatcagctgttgatgtatacgtgatgctctgaccccaagatacaatcaatattatttaatggagactaatttacccacacggcagacccttcttaaacagggtatatccagaagttattgggctaagtgcggcaagaatgcatgagtcagctggtggttagcacccaactgagcagccctgggccagattaggatggatacagcagatgaaagaacatgacaggttcatgctcagttttcatttgaaatgcatatgccacaaagatgtcgcttctttcacaatggtggagcaaactctccatgttggaaatgacaaagaagggacaaaagaaagataacatgaggaccttctaagccatcagaatatcaggaaacagaagcagacataaccatctacttggtgcctccattccacagaatcctccaaaaggaagtcaagaaagtccatcgttgccacagagtcctgagcaataattcaccactactggcaacatctgattagatgagctgcttactaatctcagccactgtggtcttgcagaattgcagcttatctagctttcccgtgcttatgtgatccaaggaacctgatgatggctgcataacacaggcaaaaaacagatggggaataagttcaaggtctattctctgggactgtcacctttaccaaaggtgtctgatcccactggtggacctccattctgggtccctgataagtttatctgctgataaaagtccctacatgtaccacctactcttttccttgatgaggaagccaggagtggcaaaaatgactgaaccaacaatgtctccaatgtgcctgcagtagagccccagggtggctctcttgtgttcaatctattttatacaatcatttttaaaaacacaaaaatagacttgtaggctgggagaactatccatctagtcctttgggagagtctctcaagttaacaggctaccattgtcatgaaaaggcctcatgaccagccattcaagggctgcctgcccacaactgctctgaaagacacccatattccagatactagaaacactctgctgcgactggtacccgacaaaccaacaatgagcaatgagaagctgaagtttaacatgttagccaatgccagggaacactgcaagtaaccaaagggcttcatcggggaaagagaactgaaagctttgcctgaattctgcttcacagtccaatgtgttcactgggcataaaatagtaagggctaggtaatatgttctttgggagtgtgataggcagagttcagcatcatgaagacctcacaaaattcaaatcaaacaaaagggcagagtcatgctttcttggcagttggagactgagaggtgacatgaatgtcgcatgttgctcctgaggcattttaatcagtgtcccctatgaacttcctttagcactgaatagaaaggaaagagattctgaaacagagccaatctgacaacactgcaacactcagtgtatttgctgagcccaaactgctgagaacatgtggtggttggatggaaaccagacagttaagcaacggtcgggtgagatgctgaatggaaatgaatataagctgggtgggtggacaaaatcctctaagggcacaatggcacagcttccattgccatggcccagccatcaggtgtgggggaaagcaacagttggacgatcttagccagtggaaatgagacagcttctttgagtggactctttgaagccttcaaggaaaacagcaggcagctttggcccatgagcaataggctctagagacagagagtggtgaaataacaagccaaagaataatttacatgagcatggaaggtcctggctgtcaaattgcttgggtgagccacacagagttcacgtgtttgacgacagaatcagattcagaaagatctcggttaagctggatggaccaacccagcaaaatgaaatgtaatagagataaatgggtattatatgtaggtccaatgatgaaactccaagaacatatatatgagtggcagcttagcagccctgtgtgtctaaaacttagaagttatagttgggagccatcaaagaagcaagttgatgaaaaattaatttgattaataatgtaaaacaaagaaggagacaaccctgtttacagaccaaaggctccagatgtcatccattaggaaggtgttcaaagaagaggaatacaggaagtcactgacagcatttattccgggggtgtgagaactcaaggacataaaggcttacattttaaagggttatgatgtggacaagagattgaagttattctataagcctattatggataaaatgagaagcaatgatggacactacagttcaatcattcattcaacaaatatgttaagctcctacgatgtgtcagccattgtgctaggcagcccgattggcagttaaggaaaactttcgcaatactcaagctttccagaaataaacagggctaccttctggacacaattcacacatggttgctgaagagagtaaggcaaaagttgaaatttcagtcttagactggttggaaatggaatgcatgcatcttaagctccccacctcagagaggtttacaatcatctgtgagttacactatgtacctctctttttcagttcttccacatttcaagagagatgctaaccaactccacatggtgttcagtagaaagcagccaaagccaacattggcaaatttaaattgaaatgaatggcattttaaagagaatactgggtttcccatagactctccaggagacctgcaaaaataggcttgaagacctcatcatcagaaaaaaagcccagccatgcactgcagagctggtctgggacgacgcctctgcagcgaaccatgagctcacatcactgtcaagggacgctggatggtgctacaggaaaacagcagcctggaaaccagaagaaactgccaccatcatcaccctcctcactggaagggattccaatcattctccaggtctttgtgtcaccagcctccacaagaaagtctggtgaggctgaatcagactggaagagtctgggtcacgctgggtcatggctctaagtcctggcttcaaggcgggataaaaaatcaagcactggcggtcgggcgtggtggctcacgcttgtaattccagcactttgggaggccgaggcaggcggatcacctgaggtcaggagttcgagaccagcctggccaacatggtgaaaccctatatctactaaaaatacaaaattagctgggtgtggtggcacgcacctctaatcccagctacttgggaggctgaggcaggagaatcacttgaactggggaggtggaggttgcagtgagctgagatcacaccactgcactccagcctgggtaacacagcataataataataataataataataataataataataataaaaaataaataaaataaaaataaaaaataaaaaaaacaagcactggcattttcagtttctataggtgggccctgcctcacaagaaaggggattctatgagtacactagatgctgagtttcaacaccttaacaaagaccaaaaacattcaacataaggtgtagccattcttctcccactactcatttaacaaagcccaacacttgaagacaaaaggtgagaaaattaaagttagcaacataacttccctaacttgatgaatagcatttgcttcgaaggatccttctttaggaagaattctgatggtcacagtcactcacaaatggggttgacattgactgggaattgtcccagtgggtttgagataaggcggctctcccctgaatggaactgacaggaggacaagctgaggagaaaccaggagtttcagcttgtattacggcagatgagttttcaggtcattctgctgggaaactaagtgaccaggaataacttcctagtatcacaggagtaagagaaacctccagcagtcaagaaatccaccacacagtctccccaaggcctatatttctatattaaaaaaaaaaaaaaaaacatagctggcagccccctttctccaaaagccttgagagaaagtcatttgataagtgagaactgcaggtgttcggaatgttccttgctaatgtcttgttctttctctccatatccccccaatccccgggagtgaaagcagagtggagtggaggggctcaccatctcttccatccatttccctgtggtttccagaagacagtgctgaggtcagagccaggataacctctctggctacacagtgacgcatccactggggcattccagactctgggtgacacttcattacgccagacttcctccaggaagtgtgagcaggctaatcacgcccctgggcgaggcgggcacgtggagggagagattagcgttcccccacagctgtcaagctgggcccctctcattaacacccacgactctctttctttcctttttttttttttttaggtcctttgacggcagctcgtgtacttgaagtatgtcactgaaaaacgcacagatgggatctaccagatcatgagaatgctttcacagcttttgaaagagtgctgggtttctttccttcagaagaaaaaagaaatgctgtattctcaggtctacccattttccactctcttcctgctttagaaataaactattgcagaagccaatgtagtaataaccaacagggcaataactaaaatctagatcttttgatttttttttaatgctaaagtagctaattgtatctgctaatcatgtcttcatagttcacagagagggtacagcatctgaaatatattcaacattagctgcaacctactgaaatccaacatcaggccgggaggggagacagcaggccaggcgagcgagtgtctgacagattgtgccctgagggaagatgtgtcccaaagcaggaggaagttgctcagggaagggatcttttatcttgctataaaagttctggacaagggtctgggtgctttaacatggaagcagtaagacaatgaggcctggaggaagaggaccaagaactgtgagtctgtctcggatgatccagaggctttttgagcattttaaccagtatcatctatgatcctctgaacaatatcaaagaggaaaagaggataaggttactattctctgggtggtcactgtgttctcttttgtatgaagctgtctctttgtgcatagaagaaaaggagctatgccaaggcccaacagtcctattattttctgttttagagatagggtctcgctctgtcacccaggctggagtgcagtggtttgatcacggctcactgcagactcgaccttgtgggctcaagcgatcctctggcctcagcttcctgagtagctgggactactgatgtgcaccactgtgcatggctaacatttttattttttgtagagatggtctcgctttgttgccctggctggtctcgaactcctggcctcaagtgatccctctgcctctgcctctgcctcccaaagtgctaggattacaggtgtgagccaccgtgcccagcaaacagtcctatttttaatataagttcctagttctggacttccaggtggcacctgccacacctactgcacccagtcagcttagggctttcaccaaaaaaatctgacaccaagaaaagcgggtccccaggaagcggtaaactacaagaaatggacgggatttgcaatcttcccagaaaatacccaacagcatttatctgtaaagactttgctgctgataatattacagtacttcttaaatctcagcaaaggccttccataaaaagaaggcattcactcaataaacatttactcagcaccttctatgcccatgtgtcagctgtagagctggagggtgggggtgggaagagaggagggaatctaagatgatttgataggctcgctactgcatagaaccccatcatttaaaatgccactaatacaatcttggaaattatgaagtttggggacttcacaggactttgactgataagtaatattgaaaaataattactcaaacatgcccatttatctccagcccagtacagccactattgtgcgtcctttcaagggacatcagggcagcagcacagcttaccctggggtccccctgggcaccccagcataagcagtgatgtgctagacagccaccaaaaccaaagtataactacaaaaccttgttccaaagggttctgggggagattcagggggaaaagttacatattcttaaaattttgatcactggtggatgcactcaaaatcctgctcttctctgggagcgattttcatgctgttcctgaaagctcagaaagaataggaaaattttatgttcagtgatagatgggctagacaatgggaaacctgcactgaaccagacacaaaggacctagcagaggtgacgcctgccagggctgtgcacctgtgtttccttaacatctgctgggaccccattagtaagtttctatgaaaatgaattagactgtgtgccttctggtcttgcgggtcagtctcttacctcaacaccagtgtctgaactgaacagagcttggcagattctgattccccctccaacctctgccccagccttagcctctgcaccatcttcttggctctgctctggtgtcaggagcagcaaacagtgcagtctgcagttagcaccttgtcactgctcagccataagcccctagacgtgacagaattactcctctgagattgaggctgtagttggctatctggacaacctgcatcaacttcctacacccacaaccctctggacctagatttctaccctgactctgcagccacgtaggccccttccccacagcaggtggaggagagggcaaggtcatgtctgccctcttccatcatgtgtgaaactggctgagaaaagcggggttgtaccctcagcatcctagctctgagaagaacctgcaccagccctgctggatctacccatgcagaccccacccctgtgatctcctggagagctacttcctagataaggaggtaaaactcatggagaagatgggtgcccacctgacaatcctctgcaggccagcaggccccctggcaggctgggcaagttcccccaagaaaataattgaaggcactttgtaaccatcttggacccttctctcttaagctgtggaaaaagtgcagacaatatagctttttgttggaaaaaaacagcaaccataagaaacagaatttgacaatttatcaactacaccaagaagccactctgtggtccctcaaattgatttaaataccataatatgtcatttaaaatgtggactctggaactgggctgcctgagttcaagcctctttgtatctcagtttgttctcctataaaataggcaatataagattattctcctcataggcattttgtaattacagattgcacatccctaatctgaaaatctgaaatccaaaatgctccaaaatctgaaactatttgaacaccaacatgacacacaaggtgaaaattctacacacaagcattaacacaaactttgttttgtgcacaaaactactaaaatattgtataaatcaccttcagactatgtgtacaggcatatatgaaacataaatgaatttcatgtatagactcaggaaccatccccaagatatctcattatgtctatgcaaatattccaaaattcaaaaaatatataaagtcagaaacacttctggtcccaagcatttcgggtaagggatactcaattggtttcggatggacagcaaagtgcctggcatctactgagtgctcatctaaccaagtaaatatgagctatcattatttctattaaatatttatttaaatcacggaactatgcttggttctatttctcacctcaatgaattctctatgatccatcgcgaaaatagattaaaaacccagataaggtgataaaattactgttcacctaaggaaaggctcataaaactggcttattttgcagatgtttcttcaaggctgactcttaacaactaatcgaaggccgtattgtgaacattgttactacacatggaaaatatattttgagaaataaatgataaaagttgtaatgtgaaccctgaaatcataacaattaactttaaaaactctgtcacattaaaatctactggtcttagacactggggactccaaaacatgggaggaatggagggggaaaagggtccaaaaactacctgtcaggtgctatgttcactacctgggtgatgggtttagttgcaacccacacaatacatgacaaagccctcagtatcacacaatacatctatgtaacaaatttgtacatgcatcctgccctcccaaatctaaaataaatataaaaagggaaaagtgggccaggtgcggtggctcatgcctgtaatcccagcactttgggaggctgaggtgggtggatcatgaggtcaggagatcaagaccatcctggtaacatggtaaaaccccatctctactaaaaatacaaaaaattagccagtcgtggtggtgggcgcctgtagtcccagctactcgggaggctgaggcaggagaatggcatgaacccgggaggtggaggttgcagtgagccgagatcgcgccactgcactctccagcctgggcaacacagcgagactccatctcaaaaaaaaaaaaaaaaaaaaaaaaagggaaaacggcacatggcaagaacatctctaattagtgatcaccgtagaaatgccttaagaacttgatccatatatgtgcttttgcctctgagtccaaacctatttgtctaaataccacattttgggagtttgggggaacagatttcaaacgatgtggagacaagcactgagaaagaccaccacagagcgaaggggatctatacacacagacaggcaagcacagtgttgtctctgcctaggaacaatccctccaacccgaggagaaatcctaggtctcattttaaaaatatccttcagaaaagaaatacctcttcaacccacacagttcccaatgaagtcctatgcaaaaatgcttcttacaaaaataaaataaaataaaataaaataaaataaaataaaataaaataaaataaaatttatcggtctatcttgagctctaaatgaatcttttacacatgaataattttttaacatcatgcatcggtcatttagaaaatcttggttcactgagttgtactgattttgcaatataacatcgttcattatacgacatttaaaaagcccacattcattaacattaccactgatctcatcaaaaaaattctttaagtatttaagttaaagtagttgtcaaactcctggtggcagatacaagttttctaagttctaatttttgcttaaaagctcaaattttatcattaacaacaaacactgtcagttgttttccttgaagtgacaagttcactccattcatttctgggaaaaggtctgtcaaatactcaagtttgaaaatcatagtctgtctcttacccattctttaaagtgaaatagtgtttcgtgaataaacgtagcttttctcaagacaaccatcctacctgaacaggcagaagcgccttgcacatatttcatatttatagagtattagaaagcacatactccactgttgagatttaataaaattggtaacgtttgttacttcatcaaggacattcttaagtgaaactggcattttttaaaaactgggtgttcgtggcagaaaagaacaaaatgactgctaatagcgtttggtagcaccgctttgattcctgctaagttgcctgcagtactgtcatccattgtttttacatctatctaatgtattatcaacacagtgaaaaaagacaaacaacatttttgtattattatgaagatagttttgatcttgggtatgcattgtaggcatcactgggctttcaaagactctacctggaaaatcactgccttaggtagactccttcacctctgcatgcctcagtattctcatctgtaaaatggagaggattcgcagtacatgtcctgcagggatgtggtgaggactaactggaataaatcatgtaaacaatgaagaacaaagctggcctatggagatgccatctatggactggctataaggagatcagacatcatttgaggctcttggttaatccaggtgtgacaaaaatcaccatcttagtggttttttttttttttttaaagagcatttatcagctatctccactgcatttatcaattatgtccactgagaacattcctggttattttcctgagattgttagagacaccaacaggtcagagactctttcaaatgccaaaacaactagacttctctttaagaagctgggccgggcgcggtggctcacgcctgtaatctcagtactttgggaggccgaggtgggcagatcacgaggtcaggagatcgagaccatcctggataacaaggtgaaaccccgtctctactaaaaatagaaaaaaaaattagccgggcgtggtggtggacgcctgcagtcccagctactcgggaggctgaggcaggagaatagcgtgaacccgggaggtggagcttacagtgagtcgagatcgcgccactgcactccagcctgggcgatagagctagactccgtctcaaaaaaaacaaaaaactctactcactgtaatttcccctgatgtggcctgagaacattacctagcccacttctgcagacttcagagcatgtcttcttaggggctgtcgctcaaaaacactggaggaaaaaggtggatgtttatattcatgtccttttgtgtgtctgtgttctcaaaatattgtgacaccaagagacagaagagaaattgcctggtccctgaacctgatgtgcaatgtcagttctctttggttcaacgtggttttcaaaaacggacagactctaaacaaaggtatctgtccctttagtcaacgagacagggaactgatttggggggttgttttttcctaatgatactaggttgaatttttaaaaattaaagcagatgtggatatattaggaagtaaaataaaaacttgtgtgatttttttaagacaattttttttttgactaaagaaacagaacttactgaaatgtatgattctggatcacagggcagaaggttggggcatgggaagagctacaagaatcttcattaagaaaactggtgaaatgtgaatatattctgtggattatataatagtattatatcgaagttaaatttcctgaatctgaatgattgtctgtgtttatgtaagagcttgtccttgttcttaggaaatacattgaaatatttagcagtaaaggggcatgatgtctgcaagttactcaaaaatgattaggaaaaaaacattagagtgagacacggagaaaaagaagtaaatatggtaaaatgtttaaaattgtggaatctgaacaaagcgtacataggaattatttgtattatgcttgtaacttttctgtaagtttgaaatcataaaataatcaaaatagaaagttttaaaatgtcatttaaaaaaaggacaagacattcttttgagtttcttgtgtcacttattaatgacagtgctccccaggcaatttgctccctgcttatctgtttggccttgtcctgtaccatctccttgtccagctcagagcactgcaacctctgggcccttgtctctgaccctcaagtgggccccgatctgcccccgaggcctgtggttctgggtgctccctagtcctgaccactctccaggctctcctcctccagggctgcctgttatcaccacctcagaggcctttcctgatcctcctatttaaaggagtcccctcacttccacttctgtcactctttataaccacttctattttatttatctttcaaataatattaccactgcccaaaattgctttatttacagttatctatcttcctccaacggattattctccatctgggtagagaccttgcatttttggtcgctaccacttgtgcttggaacattgtaggcacgcactagatatctgttagctgaatgaatgaacagatgtccccaggatctggcagtgggcattcaagctcttcctccaccaggggtaccgggcatggcaagtactcaatatagatgtgttgattgaatgacaatatgtgaatgagtggataaattagagaaagtttctaattctaaaaaggactagttctggaaggccggtgagctcagggattatacagagaaacccacatgcagcctggctcaatatggtctcccaggcatgcactttgacatttaccctccaaacagccccagtctggcttttgttccattgctccacaaaagccgtccctgcgaaggccattcacgatctgcatgttgctgaatccaacaggcttttccatctttcccttccatgtcactctaagcagcacttgacagagtgggcccctccctcctccttcagtgactattcctcaggcttctatggcactggcgacttccagttttttcctgattctcactctcctctgccagctcctctccaatcacttaagatccctaggggttacaaagaacccagtcctgggcctcctccacttctcactccatgctcattccctaggacatgctatgaatcccggtggctttgaagaccatttgtattctaagttgagtcctgaatgtgcatctccagcccagatttgctggctgacctccaggtacctttatccaaccgcctagctgatacaaccatttggatatctcacagaaatctcaaaatgtctcaagctgaactcttgatctttgctgctaaacttctcctttttccatccttcccgcctcagggaacatccaccttataaaccccctggatctgtccctctcacattcacttcatcagtaagtcaggacaattctgcctccaaaagatatcacacatctacgataccccgatccatctccagtgctgtcactgtatcctaaggtaccatcacctctcccccggcctgtgtcccactttccattctcgctcaactccactctttacatagaacccagaggagtctctgtaaaagaggaatcagatcatgtcattcccctgcttgagattctccaacggctttccatggccagtagaataaaaacaaaaattcttaacatagcctaagtggtcctatacgatctagtgcctccgcaccctcatgccaaaatactttctcttggctcacgaagctctagtaacatggatcttccctcagtttccctaaaatataaagacttctcctaccccaagtcctctgcacatgctgtttctcaacctggaacgtatttcctccagcttttcagctctctaagtcatccacaggctctcattcatattgaaaggttttaagaaggaaaattgcttaaagtcgagttggattttatagtggcaaaagagtagaaactgaattggagtgttgctggacataagggcaggttggtagagtgggtggaggctactaacgctgagggagagaggaagataagaaggtctaacctaacaacatttccaggacagtgaggaatacacagattcttgggaaattcctgtctcccaccattcttgggaaacattccttaaggacaatcatgggaatcagctggacatggtagccagcatggaaatgctgaagatgccctctcagtttctgggttggatgaatgactcgtcaaacagtgaagccactgagaagtgggattgagggggagatgtaatcggtatgaagggcaggaggaagatgatgagctcagtttggggcatgcatttgggatgccagggggccttcaggtacagatgtctaccacctgctgtgatggggacttgggaaaatgctaacaattggaatcaccactatgagaaatgagactgaaagtgattagaagcatgaagaaagaggctgtgaggcccatgggtggtgaaagccattacaactgatggcagcatagacagggaacctcctttatgacgagactgtcactggcactttattaaagaccatcattctatagtcagaagttcagaccatgttcacaaaacacatgaagccaggatgattatttttggaatgcaatgaaaagattaaatgaaaacataaaactattttatgagcataatatactactttgtttagaaaaatatatactgcttgtttgttactagtatgaaggttgctaaatagagactagacactatctagactctaggtgttaatttttttccattccaaaacaaagtaattcacaaaaacgtgcactattcattcatgcaataagtattactaagtcccactgtgggccagatgctattctaggtgctggagagagagtagtaagaagtactgaaggcactaaaaaaatgcatgttggatgaacacatcaaatcaaatcactctattattacatcacaccctcaacactgctccccagttccacagacatgatactatcagtcagcttaccttgattagtaatcattaaatgttgcagaaacacctaacagttaagtcctatgttgaaaaaaaatagacatccaataaaatgcaaatttgtggtaagcagtaggagaaaacaagaagcggaaagaggaaggttgcctaacctcgatggcaatattctctaggtcatccgtgagctttgagttgtgaagaaaaatccaggcaggtcaatttgaccttggaacagaattcttttggttgaatgttaagtggctaaattacaactttggggagaaacagttcttgcaatggaacgctcttccctgcctgattagacttaatcagacttttttgtactttagggtcagggaaaattttcaacctgtaatcatgtacttattgggacacactaagagttcatgatggatttttaaacacccagagccttccaaattaactcaaagtctcatgatttctccctttaatatgttactttataacaagtagattttaataaaaattaagggaaaaaaatttcaggtttctgccaggaggcactgacttgtatttcttccaagtctcatgctctctgggggtatgcatctactgaattcataaaataaaaacatagtaaatggtaaatgtaaatgtaagaagaggtaagacatttccatcaattccctaagaaaactatcaccaaactcttgatttggaaataatgaagtctcccaagtaaaagtaaaaggagggttggctaggggattcccaatgcctgccaacaaaacctggtttagactttctgttttagagcattctggccaataaacttcacagagatttaaacaatagccctttggattcactttggattccttaagtccatggactgtctttcaaatatctaaatgaaactagacagaagttagaaaaaaaacaactagataaccctaaggccacaaaattaggtaacttcagagagaagatgtcagaatttttttatgtgcatcaagtctatactcatgggcagcccaggaatctgcgggtaagaagcactgaagtgataactcatagggttgaaaaaaattccggagctgatcacggtgaaggaaacataaagcacgcagttctaaaactgttttccagattgtattctttaacaaagatacctattatttatgcttttgaaaaaagtcagtgacgtccctacacagttcataatgagttctgcagattcatggaattcctttcttgaaatcatttcctttccctgaacttctatgtttataccatccatagtatcacatccatcttccagcttatttaaattctgactgtgaacagggaccatgtttgtatcttctgggctgtgctcatcaacttcctagtagctccataaacgtgtataacaacaatattaataatattaatgaagcactacattaaaaactacagcgtgtgtatcagtatttcttctatttccttgaggtacagcaagcaacctttgtagaatttctctatcacctcgtgggtaggagaatgaaaagagtttctctgtcaagatgatttggagcttttggatagtttgctccaagtcaacagggtataaaagaatggtccttatactcttgtgtattttgccaaaggcagcaaaataaattagtcatcatttcacacgtggccaagttcacaaaccatcacatcttgccaacgtgcccaaggaccatatctgtgctctgcgacctaaatacagaaaccctagtcttaatgtccaccactttcttgagtattttatgtcctttttgattactattaatgtccatgggaacagataaagtagctacaaactcttttaacaggtatgagtatcagctatcactgtaactttcattaaaatataaaaacagttaaaaaccaaacagagcatcactttttaatattatctaaaataacaataaaggtggtcagatggttacgtgttcatttaattgctaatgaagccagaccaataagtcaaagctggattccctgtagaatatcgatttgaagtattagcagcaaggatcgtttggtaagacagatttaaaataggagtaaagattttactttccaaggattcatctttgaattcttgtgggtggttgttttatttccagcctgctaaaaaccataatatcacctgaagcaagcaggcatgagcctggaacgggagtgaaatgacaacgaaacatttgtacatgttattaaagctaatgaagcaagacacgcactgcctggttttgtgtcacgcgcccctggagagcccaactgtgttctggggctggctgtggcatctccccaggatatggctcaccctgaggcctctgattcagcggcagagctgtttttcccctcgggaaagaccaaacagacacctgaccttttataaaacctctaggatgaatcacaagtaaagttctttggcattctgaggtggtgggtggaaatcaaggcttgacaggcggccatgggatgggcagcgtgggctggcgctatgggctatgccatagcgtggagaatccctcacactaggacccctggcctgcatgtcatctggcatccagaactcccactcaatttccaaaaggtgctacccaccctggaaaaaaatctagcccactgagtagctgggaaaatccacagccagggagacagatggctcaggaagaagcaatctggaataatagtgagggtgtgggagttggagtgtaggctgggcaaggagatcagagaggaaagaacgggcatctgtatgtggcgacagatgacggagtgctgtttgggacgagcagttggaggaggcaaaggaaatggaagtaatgtacttatgcataagggctgtatcataattaggaaaattccccttctgtctaccccgcaagtcccacttggttcagatgggggcagacagcagagagcacttacttcacggaggaagcagaggctacccgctattccaacaggctttctatttctgatagaaacaaatccaaactgagctaatttgtgtacagctgcaggcaatataaacacggctatttagaattctttatagagtataggcctttgtactctatacttcatggaagttaataagtaggtgtcaaactctgaattaaaattcccagaagaggacacagcacaaaggacaataaaaatgatttttaaataatcatagggataaatagcatccacttctgacaaatgtaagtgctggcataaaatgttattaggctacagagattgtcttttgttcaggaagtatattttattctcctgcctcatcattcatcatcctaatgagccctcaaaatgtaaattaaatagcaaagacggattcatttgaaaagcatcttttcaaaaaaaaaaaaaaagctaggtgttaaaccattttttctacttttattctatatattgtttcattttttcattgaaaaaaagccctcagtacttgaacactttatggggtaagttcatgcaattcatattttcagtaaacagttcattcattctccagtactatgggattggtgatttgaaaagaaaaaaaaaatcgcattttaaaatggtatgccctgtaaatgatgtttgatccggaaaatctgagaaacctgtgcacgcattcacttttttgttttattcagaagtgatttggtccagggaaaccctcaatggaaaaggattagtgaaaatttcaaacagctttagtttactgaactgaatgcattaatggctaagcaaacaccagttcaaccattaatgataaaagaagaaggtcatgagccaaattagttgcaatttcttgttatgtattgataagaacattacccgttcctatgatgaatagagaaatcagggttttgtacttgacctgaatttatgcatgagcacacacaacagaagtgactgaacagctctgctggggaggcacccaggaaaaacacgctgggaaaggaaaatagcagcaaatcatgtctcattttggcatgattggtcctcatttgcctgtctctctctctctctctctgtctctctctctctccccctcactctccccaccctctctcactgcaacccataaatcattcttcgcattctttggctgttcctgcttatgtgagagagctcagctcccagctctctgtgggtgaacatatataaaatgaagacacaagtaactgcactgttgaggtttgcctgatgtccagggaacagccattaatctgcacaagggggtttcaaaagccccactctgccgaataaattatcgttaaccaatctaggcattctaaagacactatatttttatgaggtcaaatgttgcagaaatatcccagagggagggtagaaactatccagctgtgaaagaagctagtgacagcactgcacagaagcctggggggtcctgcagtggctacagaccggctgcagccctggctgaagcacatcctcagtctgcctggttcatgaggactgctgcatttgggaagcactcatccctcacagcagtgcccaatgcaggctcacctctagagaaggggcatctctcttggaaggtctggctgatgaaagagcatatcatgacagacaggagctcatggtaaagcctgcataatccactggccatcctgttccagtttacttactcagttatttttaatggagaattttctttttaatgtgacagaactgaactcaatgcaaggctcaaggctgtcgtcatgacagttgcccacataaagaaactgtagtctgggcccaaggcatggccctagcaatttcccagtaatgcacattttgacgggcacatcaattggtttatgatgtaagaacaacactaattagtgaggaagaagccaatgtcctgtgttgatagggcccggtgcagtttaagtgatgaagtgaacgttacttctaacaaaggaaaacaaggtattattctgcacagatatttaactctgaagaagtgttgaacaatgatagatgtattttaaagtggaattgaagcttcatccacagtttaggaagagaactggctaggatatcaataaattgttttatatttgaccccaggcaggaaaaacaacatgcaacccagggaagggatggtgccttgctgtgaaatatgtgcattttaacctttgcaatatgttaataattaatatgaattcacaccaatacgatatcttcataaaaacacagaactctcatgtataaaacctttcaagtataaaagaaataagctaccccctaaaggttttctgaaaaaaattcccattaaagaaggttctcacagtctgaatgtagagacttttaaccagacctaaaattcttgcgaataagccccatgctatatgactgacagcaccattaaaaacgctaaaaaataaaatacacgcttcattagtctcccagctgaactcagaatctctggcccagaataaatcttagcctttaagaataaattctcttctgaattaacatctcagagtcattaatctttggagtgacccttcaatttcatttggagaactactacattcctcaaaggtcttttttcttttggcaagccatgatttcatggagagaaggaaaataacatgatctttcttttatcatttcctcattctcgccctcagggtggcttctcttcccttcccaactgaaacatcctaaatctaaaatcaacagagagccttctactgagtcagcaaggaactaaaatttaactttagggatacgtgaaaataaaaacaagactaggcagaattattattatacatttcaggaagaaaggaagcattatcgtgaacacaattttaccaaattaaaaatggtacagactttattctctatttcaggggccttgtttattaagcagacagaactctgcttgattattccatgaagtcgccaaccattaatcatgcacatttgtttaacaggtcaaatgaagagaggaaatttgtgtgcagtcacggcaaatactgcctcattttacccactgtgatactaaaggtacagacatcatgttgtaactacattaggagagattggtccataaagtaatttgattataattccttcttgagcagacaactatttttgaaaagcaaataactatttattttttgattatttatttttaactgataaaaagtatacgtatttatggggttacgatgtggtgttctgatagatttatacattatggaatgattaaatcaagctatttaacacatccatcacctcacgtactttcgttgtacggcttgaacatttaaaatctgcttagcaattttgatatatacattgctattaactatagttaccacgcttatttgcttatgtatgtatgtatttatttttgagacagactctcaccctgtctcccaggctggagtgcagtggcatgatctcggctcactgcaacctctgcctatggggttcaagagattctcctgccccagcctccccagtagctgggactacaggcacataacaccacacctggctaatttttgtattttttttttggtagagatggggtttcaccatgttggccaggctagtctcaaactcctggcctcaagtgatctgccagccttggcctcccaaagtgctggaattacaggcatgagccactgcacccggcctgcttattaatcaagattttcaaagttagatgtttaattaaaggataatatgtctataccactcatccaacaattttcactgtgaagaccacattagccagctcccagaggagacacattctggtgagggggtggctgggttcaccatattcgcttctaccatcctccaatcccagcctctccctctacctgggggattcactggaaccatccatttgtattcccacattttttgtgttcttaagccagaaatgtctcccatatagcttgccaactgcccaccgcttccaaacacctctatcctctactgccacgtgaatcttaaaatagagcttccactgttcagttctccagactcaccagccgttaatagcccctcatcacctagaggataaatctatagtcctcagagccaaaagcagccctgccctcagccttctcatctggctcatttgggcaatttcttctgaacagtctacaggcgttcctattgggaacatctgctcatccatcccacctgcaatgcctttcaaaatgtgattcaaattcatccactttaccctacctcacacacaaaggcctttccctcattttccccctcaaaacccaatgaccacactgtcttgcttgatatgcattccctcctgtctcacagggctatttaacatttcacttgtttaagtcttatccatgtttccctgagagcaggaattgtgtttggtactcacatgcacacagcctgcatgtaacatcacaccttacccagagtaaagactaaaacaaaaatgtaatcatttaaaacttattttcttgttcctactttcaatcaaggaatcatgagtctcagagatactctaggcccctaaatctatatttgtgcccaggagttgctgatttcagggatgggagtttcaaagagagggtgcagggtcttttttaagtcttgacaattccatccatggccccttgtaagttttagaggttgtgaaagatactgaatccttggggttccatgaacttgtctgtagtgggtctgtgcattcactccatcatactcttggttggcagagaagctcagccacttgggccactggaacaaggtcatttggagggcagaactcagctctggggcagatcatacgcacaggattggttttggaatctatcatgtgatagagcttctccacctaccttctcttactacattaacccataagagaggcttacctgttaccaactagtttcatcacatactgtctggagatatgacaggagatactggaacaaggaacacgcagacagtgaaagtttattgattcagtttacatttaatgattgattggtagaaagagaaacaagtcctgaacaaagtgtgcccctccttcttgatgccccaaaatgcatttaaaaatctctttcaaatatacctcgtatgtaccctctgcctcatacctaacactgatcacattttgtccagttagattgcacctttcctacctcagaaaggtttacctgaccttacttgaccatgctagcgaggtctgatcaccatgttccatgcacatattttaaagttggtggagcacttactttgtccctggccagctcctgctggggaaccttgtctttaaatggactggccttagcctgtcccaacatacacatgccccaagatgctgacagtaaattacaacatactcactcgagtcattacaattttttttttttcaggaataaaggaggtacgcgcaaggtcagagagcctcctaaagcagtttggacacatttccatgatgctctctgcctgagagcagagctaaaatcatccacagtcctctactgcctccccctccatgctacaaaaatgtaaaagatgcacatttgccattaggaaaactcctcattgcattttggacttgaagtccactggagtagggccatttaaaaatggtctatataccacgcttcatgaacaagttttattacccaaactgaaaaaaattagtgatggaaaaaataaggcagatgtatattacatcagaataactgctgcagaaaaaattccaacatcatatttcatttgaagatttcttgaatggccaaagagcagtatttgtgaaaatttttaccatatgtatttaggatactttcttaaagttttattttttaaagacttcaatttaggaaaaccatgtttaaaatgcattgacttcaactcatacctagtgctgtaagaagtaatgcatctcccttaacgaaatgtccagttactcctaatttttaagatttcatcacttctctcttaacttcccttaatgagaaggctgaactagctcgcctagctgaatttatcagtagcccatgcttgaaagagaaatggttctgccctctgttgggggcaacaggtgtgctgatggaagacagatgagctaatctgttcacctgaatcctctctgtcatgttcaatttagcctcagtctttagaaacacaacctaaaaggtctaaggcaaatagcagctgtccaaatcagagaccaaattagagaccctgtccctgagtccagaaagggtaaacatactctattgtttcctcaccatttgtttttggaaacacaaaattataggagggggaaaaccttattgttattagaatcatctttcagcaagaaagacaataaattctaagacccttagccttttgtataactgttcagtcaggggagtgttagcactgtgcttgttaatttagaatctagtttatgaagctgattatctttttaaagcaacacattatccgtgctcacaaaatatcatagtattactaggaatgtagttatcacattatattgtaattatcacttaaatatctgcgctgtttaccaggaaatataagctcttcaatgtcaggagttactcctttttcaaaaaaatcatggttcataacacaacatttgaaacatgtttagcattaaataaatatttattattgctatacttatcattaaactacgctagtagatatcaactattgagttcttattgcaaaaggcatcgtgctcaactctttccatacattgtctaatcctttatggcatccctatgggacaggtattaccaccctctgttcacaggtaagcaaacaaggcttagtaaggtaggtaattgctccagatcattcagctgtgtagggaagagacaggcttccatccagggccacccaactccaaacaggcacgtccctaaatgctacactaaatatccatggacgtccatgattctgagaactagctctctgcactcactatttgtaatcaaaatcagcaagtgttatattaataacttcagaaacgctgtcatagtcaaaaatttgcatcaaatgtcttagaaatgagcctaatagtcacaatacttttcatcatccccaagaaagagacgaaaaagtatattcccaataaaatacttggatggaaaggcacaactcgaaaaataaaacattgtaaaacttcactgtaatatgagaacaaatgaagagagcagatgatgaaggtactggaataaattaaagagagctcatctataaagcatagatatcgaggacaaacttacaacttcaaatgaataaaaactgttaattaaacaggagcttcagtatacatataatgtttgaactttgtcatttaaaaatagcatttcgttttctgcaccactagaaactacattttgaacacattcaggatttcacagctacaatactagaaatgtttattccaattaaatgttacaattactctactgtgtattatcttttcctttatttctccctatttcatcaatttctttttaaaaattgtgtaagtcatgcagtttttgaaactcaccatcttacaatgacttttattcttaagtatgtcagatggacatttaactcgatgtgactttaagaactctttcttttacgtaatcaatcacttgtcctaaaaagactaaagcatgtgcatcaaaactgtatctttttttttttaagcatgcagctgtctttgtcaagcactgcatcttttcaaggaaatgtcagcaatgttattcttgggcctccttctgcccaagaggccaaggagggatgaacaatgacggcaacaagacacttaatcaatagcagtcacagcaccattttttatcctccagaatcttcattttcaatgaggtttacatcattaaagtaagaaaacaggaccgtcaatctccattggcttcaagtggtggacggaagaattaatttgactgccataaaaataatgatgtagctgtatgctttaaacctttaaaaatttatttttaggcttaaaacctaggaggaggacagacatgttgcctagaaataaaagcactgatttatcaattctttctttttcttatattctagacagattttttttttaaattttatagatgtggtctcactgtgctgtccaggctggagtacagtggctattcacaggcgagatcatagctcactgcagcctcaaactcctgggaccaagcaatccttcagtcagtctcctgagcagctgaactacaggcctgtgccatggggactgactccacacagatttctaacagatctgaatcttgtaaagaaaggcaataggtttcaatccaagtccttttaaggtgttatgaataatccatttgaaatatatttattagcagaggtacctgtgccattgtttttgaatcatgttgacacatgccatctccaacatgtgttctcactatgacagatttatatgaaaggagtaaaaacatcacaagcacccgcataacgccttcccaggggcagaggcaggttatctgggcccttaaaagctataatgctatctttaaagaaaaaagcaaaattatgggtttgaaattaagtagagggccttagaagaggacactcaaccccggagccctgaaacttaagctgtttttttgagacagagtctcactctgttgcccaggctggagtgaactggcgtgatctcagctcaccgcaacctctgcctccagggttcaagcaattctcctgcctcagcctcctgagtagctgggattataggcgtgtgccaccacaccaggctaattttttttatttttagtagagatggggtttctccatgttggccaggctggtctcgaactcccgacctcaggtgatccacctgcctcagcctcccaaagtgttgggattacaggcatgagccaccgcatccagcctgaaagttagacttctttaatggtaaatctgcccctgcctcatccaccagaaaacacaggtgcccttttgcgtgtgcacaggcgagttctgaaataggagggctctctgtttggtctttttgttcccacagtgttctcccccgagtgccccagacattctgtgtgaatttggtacatgtaccagcatacgcctggagtggtaatgggacaccagctcagccagcggtgctctgtgaattttctggaaaactacaggtggccacttccacccaatgaggcagcagcaagggaaatggcaggacaggtgaagggttttgattggtacaaaattcagggaacacacaggctctgtcattaggtgtacgttctgggttctcatgcctagctctatacattcaaatactttgcttctaatcctttagttttggtattcacttcaactgaacattcatcagaaatgcaattaaaaatacttttaacaaatgattgagatacatgcattcccagctcattttcaattatgacaaaaacaaaacaagccttgcctggacagtcacgaggcttgaccgggcacactgaatgctcagaggtcagagtgggcaggagccccggagcaggaggaagaagcgggcaacctctctgagttctgcactttctcccaaccagcactctctcacaggctgcacactaactacccctccgtgcccctgtccttcaaagggcaggactgtgggggtgttgggggcaggctttgacgtgcaccacttctgtctgggcacagtgacctctgcatgcccctggcctatcaggtacagatccacagcctgtcagttgcaccctccctgacaccaccaccgggacctgcacagactgggagttcatttccttgctcactggggcctgccttccccaggctggtgtcttctgatagccaaactgaggggtgggaggtattttgaaatgcagatttaattattcatgtgtggtgaggccaacagatcaggagataactgccactgaaatgatagtttgttacacacagttcccaatgggaggggacatgccacacacggtgggggtcacacagggaagcaccaaggtcagctgggaggtagagggagccagggagaaaagtgggcaagagcctttattgttttccatgggagggaacggacaaggatttgagtaagtaggtttaggattggctatttggaataacttcagcgagatctggagcacagaggctgtcctgagttatctggtatgtgtcctggattgattagggcaggagacaggggcccagagtgtgagagcccagaaaaggaggtggggtatgggctttggagcagttgtttgtgggtgaaaggcgtgttcccagcagcaggccaggcttttgctgtctccgggaattagctagcctttcagggtcagtgaggccctaagatgtcaaagcttcaaaatgcagaataaaaagacatgatcagtaaagaagcgaacaaggagcaggcaggtgagcatcacagcctccagcagaggcagccagagtctgcccagcccggcaggatgctgaagctggggaagacagacttctcttacccctgctgcaggtgcgggcaggcgggcgactgagctttccactttggtcctgtgacaaatggaggacagctgcagatggatgtttcacccaacaccaagcaagcagacataacctcactgtgcgaggcgatactgcctcactgtacagatgaagacacagaggttcagaatgtgtggaagggcttttcccagggtcccacagctcatagttggtagagccaggattatctccattttctctctcaggccctgggcttaaagcccaccagcacattttttttttttgagacagagtctcgctctgttgcccaggctggagtgcactggcatgatctcagctcactgcaagctccgcctcccgggttcacgccattctcctgcctcagtctccggagtagctgggactacaggcacccgccaccatgcccggctcattttttgtatttttagtagagacagggtttcaccgtattagccaggatggtctcaatctcctgacctcgtgatccgcccgccttggcctcccaaagtgctgggattacaggcatgagccaccacacccggccaaagcccaccagcttttgaaggtctcgcacaaatgtttcagacctttagaaggaaaatatatgggctccaaaataaaaagagaaagcaataatgtcaaaattaataatgtttaattaaacgtctaaaaacatattaagccatttttattcattgttacatttagttttcattacaaaattcattacacttgaaaataatatgtagcttagattttttcccacattctaagaattcttgagtttgcctaatgataactgagaagccaactataaattaaatgaattactcatagtcagataactccaaaagcaaaattataaaagctctttataaagagctttataataaactttataaagtttaaagaattttttcaactgttgtatttaatatgggatgtgagtctattttaatctgtctcccaggatggggtggggcctctgaaagaaagcaggcctactgtttcggaggtcttcaaagggccctgcctgcatcaacctgctctcaaattccagctccttctactcgcattccctccccagcaacacctgccctggacggcagttccagaggtcccttcagagcaggcccactgctgagaatggctcaggggctctgcttcctgctcaagacagcatccgatctctgtagcactgcaggccctgactgctcccacagagtgttatggcctctacgcacaccaacatcctgagcaccagagggaatcttgggagatcaatataattgtggagaataattctaagattacctcccagctcgtggtggggcccagcattcaactctgggtccttccatcctagaacagcatagagggaaggtgtggacttggggggtgaccaatgccagtgaccaaggagaagctgttccaagggtgggcaaggaagggaatatggttgcttaattctcacctccctggcgctcccacagatcattctgtgcccatgaagaagacatcacagggtgaaccatgaccattaacagctttgctaaaaaaatccacgtaactgtctttgttacccatggcaggacctgcctgctccctggtgctggggccaccttctgctcaggatgtgacaatggtcacaccttctcagaaccttccacaacaggaatatatctgattatatgaatatatgtgaagtatttcacagagtgtgctacacagagcaagcatttaatacgtatgactgactaggagcctgacagtctctatttagacagcactgtggactcaatgcacgtttttcctcaaaattcacaagttgaagccctaaccccagtgtgatgggatttggagatggggcctttgggaggtaattcgggttggatcagatcaggaaggcggagcccttgtgatgagtgtccttgtaagaagagacatcagagacacagcacaaaggtggctgtctgcaagtcaggactggggctctcaccaaacactgaaccctgcccggccctgatcctgagcttttcagcctccagaattcggggaaaataagttccccttgtttaactctacagtctatggcattttgttacggcagcccaataatgctcactgatggttttataaactagagaagaacatcaactaacactatttgattttcataaattgagaggggctagacacagaaacttccaaatacctttatcactatccttaaattctatttgaaatttttatctatcagtatttaagggactcagaaactgagaatctgggttcagactacttgagtttacatcccgttctgccactttctaagttttgaggctccatgtatctgaaccacaatcttcttatctgtaaactggagctaataaccggccttctctcatggaatggttgtggaaattaacccatttatgccagaggttgcaaatttctttttttgtgcaaaatcagacctttgcaatgaccttgagtagtaggatataaataactcccacaagcttagcaataatggaaccagtaatggaacactaggcataaatgggttaaacaggatgttcctcacaaagcccagaaaaatacacattgatatggtgcctggatgcctttttttgaaaaaaaaaaaaggagggaaaataaagataatatttatggctacatgtgcatctgcttaaagaaaactctagaaggacacacaaggtaatactaaatatggttgtggtgggttgaatgttgagggaagggaggagagaaaaaagggaggaggaagggaagaaagggagggagggaaaaaaggaaggaaccagaagcagtgtctggtacttcatcagcattctggttgtttgacgttttttctgatcagcgtcaggaattttttttttttttttgagacggagtctcgctctgtcgcccaggctggagtgcagtggcgcgatctcagctcactgcaagctctgcctcctgggttcacgccattctcctgcctcagcctcccgagtagctgggactacaggcgcccgccaccacgcccggctaatttttttttttttgtatttttagtaaagatgaggtttcaccatgttagccaggatggtctcgatctcctgacctcgtgatccgcctacctcggcctcccaaagtgttgggattacaggcgtgagccactgcacccggccaggaaaatacttttaaaatgcttaaattacataatacataggtgtatgcttttagaaacatcacacagtacaaaagcacacagatttaaaaatgtaagtccctcttctgcttcagtctgtatccaaaattaaccaattactaatagctttgtgtgccattatttaaaaataaaaatggaaccacgctatgtacaggtgtggcagctgcctttcattcagcatttctcgaggccttttcattgccagcacacataggttggctccattttgtgtaactgacacatgagaaaccacaccatgattacaccacgatttactgaacttcttctgtataagaaagcactggggttgttgacagtttttctgtatatgagttgatgcatgagcatggctatttctactggatatgttctgagcaaggaacatcaagctcgaagggctcacactttcaaattgtatagatactgccaaattacattctgcaaagacaatgcctgtgtccaatcccaccaacaaggtgtttcccatactttggaagagatttatgtaaaaatcatgtaaacatttttaaagtgttttttaagttgaaccgcaattcagaaacattgagtagaagtgtgtctttgattttaaaaagatgatatgctgaaatttagatacgctgaagtgcagagacattcttgtggaatagggatcagagccttcccttatatattattgaactgcatccatttacataaccttctgaagtcagttttataaagaggccaccaggctcatggcagacaggatcttacccctgataaaggctgacctctgacactgcaaagcccctcaccaccgtgccagccacagtgagcgtccgggctatgctctccatccttgctgacgaacagacagagcacacagcagggactcggtgggagtgatttaaagtactgaactgaagaagggaataaaccatatttgcacattctccatagctgcttctacacttataaaaagctgtctcggatgggcgtggtggctcacgcctggaatcccaatactctgggaggctgaggtgggtggatcacctgaggtcaggagttcgagaccagcctggccaacatggtgaaaccccatctctactaaaaatacaaaaattagccaggcatggtggcacacgcctgtagtcccagctacttgggaggctaaggcaggagaattgcttgaacccaggaggcggagattgcagtgaggcgagatcgcaccactgcaccccagtctgagtgacagagtgagactccttctcaaaaaaaaaaaaaaaaaaaaaaaagctatctcattttttcttttttcccctaaatttcaatggagaaactggcaatataaaactcaagaaaactctgtccaccttaagtttctggataaataactagggaggcctaagttggttgtataataagtagggcatttatatgaccttgtaaatttgtatgaaactgtgtactatggaatgcaccaaacattctgcattgaggagtttcctactactatcagggacctctgaagcttccccatctaaagactcacctgtgatccccaaattccagaaatatagaaagccatcctgacccactcccatgctgcagccacctgtccataagcccactcctgccacttctgcaggagtctctggttcttggagttatcttcctgggtcagtgcctgatgccttttgcatgaactgtcacccaagaacctgtcagaagtttccagctgaagtgaagcagatttaagtgaaatgactctaaatttctagtcaagatgtttcatttgatcatttacttccctgtcaaaatgcttttttttttttttttttttttttttttttttggagacggagtctcactctgtcacccaggctggagtgccgtggcacgatctcggctcactgtgacctccacctcccaggttcaagcgattctcctccctcagactccccactagctgggactacaggcacgcaccaccatgctcagctaaatttttgtatttttagtagagacggggtttcactgtgttagccaggatggtctcgatctcctgacctcgtgatctgcccgcctcggcctcccaaagtgctgggattacaggcatgagccaccgcgcccggccctgtgcattcttatttcatagttctctctccatcttcccaggtgtacatgaactgttttgcaagtacaccccgtgaattttaaagaaatggtttacttttattagttactacatataatttttttaattgtattgtgaaggctttttaaaaagctgaacaatagttggttactttatctactaaagttaagtgaaatagatatttactacaaaataaatgaaaggtgaattcaactaatttaccataattatgattgctattttgggataacaaagaccaatatttaaactgaatttcaggactttttattcagcagcaagtataagacaaattggatggtaagcatatatactttgaaatttcattttcagtcacatgcaattaatttgaaaataaaacacccccctggctcccattctctccccctaaaacatcattccagcctattttcatagaatcgtaggagtgaaatagagtcacacggactgtggctatcaggccccctcagacttactcaaaatgtctctttggccaggtctgcccatcctttggtggaggcctgctcagacccactcgggtctctctgctcatgttggtcatctctcctcacactgacctcccactgcccacaccagaccaccttttcaaaacccggcttcttatctcaccttgcaaggcctctgctgaggattttagtgcccggttctaacttccttccagttctggagagctcactgtctagaccactcctgttagtcctcattcacttaccgtcttctatcatcatttgacagtcctttctgataagatcctttaggagtgagacacacatatattgttttatttgaccagtaaggtaatgaatatgtagttagcaaatgccaataaacactgaattgaaatacgtagttgaaaaaaagatgtaggcaaatgaattttatgcacttaagagccccagaactctaatgcaaaattataatctgccagtttaataaaaacacattaattgtgaattgataagaagaaacaaagcctctcaagtgattaccttctgaaaaatactggagacctcatctgataagctgggttgacaagtcttaaggcttttcaaagtctagctccctctgtaatttccaccaagtacacgacaatgttatatgagaaccacagaaaaaatgtggctgcttctcttccttcctgttattaacaaaaatgtttgcagagtggaagatgtctgagtgctcattcccttcatttctgctttagcttcttaaagaatggacattttttccctaaaggatcttcaaaataataaccactcccatttactgggcacccaccccgtgtgcagcacaacgtcaaacgccatatgggatcatctcactttaccatcactcaagtcatagaggccagatcctccacaaggacactgaggcaccgagagagagtgggtaccacgatgccatctcgcagccacatccttgccctgctgccaggctagctcttgatgctgaccacagctctccaagcccatcgcctaggagaagctgtgggtgcaaacttcaagaacaagctcttcctcaggaagagtgcttctgtgagccactggatctggggcaacttctccttttccatcatcttctctgccccgggcatggcatcacagtcttgtccacagtcctgcacttgctcacgttgacactgggggctgccatgggtcgcctctggcccacctgctgcacccggatactgaggaagcccattccccaggaagcctcttgcggccacccactctgatcacctcctgccaccagaccaatttttcagtcatacattttcatctcagcataaaattctaagacagtccccactgccttcaggcctgacatcaaaggctccactgcctggggctctctcgctttggccaacgctgactcccactttgccctgccctcacagggcctgtcctgcctcctccccaccagcagcccagtctccttcctgtttcctgtcctccactccttgctcccactcttccctcaaacctctgcttatgctaatctcaccttctaaaccaagaccactgcaaatgccgtatttctgctacagccattgtcacagggctgggcacacagattgtcttaataagtacctgtggatttgacatgtctggattttggcaacacaaatggaatgcaaaatactgaatagataagaaaacaaaaatgcctacttctgaaaaaatacctcttcctactttcacgccacattcacaaatatacacaagttcttccaactctcctaatcttggcaagtttaaactacagttttctgaaacaaaggtcacttgctcagctacagataaataaaaattcacaagcatctccaggaaaatcaatacaggtactaaaaaatctaagttgataataaatttcagttccccttgcacatagctcaggaatgtcactatttactggaatcactgtaatatcagatatttcagaagagtattgatttggccactgaagtgtgactaaagggataaataaactgctcctggggtcaatcgatccatttatcttcactggtattttataaaaagtcaaagtagcataaactttgataaataaatgttatcatgaaagaagtattgctgacataaggatttgaaggaaaaaagaacagacagttccgctacctgaacgccacacaattggcttcacattttagtagttttaatagtagctaccgacatagaaacattctttttctcctgccctacataatccatggggccaggtcaaagtctgagccacatggccaagaaacagaggggccacaagtcaagtcctaatgaaatagaaaggcaaaggaaataacatttgtttctgccttattagaaagtaactgctagggtctccaaggtagacacatgtctttggatattttgaaggcacgtctggaaatggcagaactatttagacttagaaaatcaggatggtgtgcactctgaagtggctttttagggctttattgttaaaccatgctgcaccaataaccacttaactgcactgcaatgatcccataagatttcaatgcaaggccatggagagctcacaacatcgtggctgtaataggatattaaggcttgagaagaattttaattcaaatgtaggaaacgtgggaaccctgtgaagaggctgtaacttaccatgagaaattatactggcaaggttttactgcagttgtagggagacagtattaccatctcatgatgaaacaaagtgatgatgatgaaagtacatgagttgatactgtaatttcagcccaataaagacttcacttaaattaccataccccaggggaacgcacagctttcaggatgcagagactgttatagatcagaaatttggtttgggtcacctctaagagggctctcaagctttaaaacatttccaatccaaatatgtagctctaagactcgggcccacccccactccccttctcagtgaccacccagggctcattcagaagctccttattttaattcttgccttcacacagaccactggaccactgccgccttcaaagacccctgcccatagcgacaacgtttttcagggtcccattggaggaaagcccactcagcatttggtgaggcagctaaaagggctgtacctcctgcgggctggtgcagtgcccagcaggacacagtgggccctggatacaatggcatttactgactggaagtgtctgggtggccagaccaggcctgggattctctgaaggtcacagaatgttggcaatgtggttctagcagctgctagagctactctgggcaagaatagagcggtagccatgggtacagtcaaagggggaaatgcccatgacgaaaggctgtctggcaggtttgatgatctccgcaaaataggtctggctcaattccgtgacggcaggttgctagaaagagtccacagagtgaacaatgctactcattttcctccttctcctaaagagccgcaagtgcaggattagccacaggctcgtaaaaatgcaggtcccctctaacagcaggttgctccatgtcttttgaagaaacagactgtgtgcgtacatgcatgtgtgcatgcctgcatatgcatgtgtgtgcatgcatgcaatctggctatgaacgcattgcaaaaagtctctctgatgtcatgacactaaagaaataaggtgaggttatctttgatgggatgtctcttttctcttttttacccctcaattcttctgaggtgtgctgggatccctgaagatacctccccaaggcattatgtctgcgtattttgagcctgctctttctctaccatggatctcctctacatgtggattatttagtttggctacagaaaatctaaacatcactgcagctttgtctgggtgcttgggctgtgcagcaatctgtgtttctcccgctgtcaagtgggttcttccaaccctgctggcactactaaaccattgccctcctctctcttcacagccgaagggacacctccacttataagaaactcattatcgtgatcccaacctgctactcttcaggtgttcactatttcagagaatggctggcaactccacccttcccactggccaaactgggaatctggggcttagcctctcctccctcctcatttcacccccatccaatgcatcctccagtctttctgaagagccatcttctctggagactcctctccgttgctgcagtactgagtctagctcaagcttccactcattcttatcaaattgttgcagtcacctccctgcatctgctctttctccagtggtttcccttgctgcagtcacagggatgtttctaaaacaccagtctgattatgttgctccctgcttgagacactttgatagctgtgccccccagagcagaaggccaactgcttgtcacagctaagaaggcatttcatgaccggtcccacagtcatctctttcagctcctgtcacaactccacgttccggcctctttccacgctcacccacactttgaggctttgaaaatgtttttccctctgtgcctcctttgcgtctctgcttggatgtaattttctcctacttagaggcagaggtccctcctgggtgctcccacagaacccttgtgtgcgggtgaatactgttcatcaagtatagatgtctgacatatttggaagtatatttgcttatgactgcttaaactgtaggctcatggactttaaaacagtataaactttaataaatagtataaataatttatagccctgtaaattcttaaaatctggaagtcacatgctacaattagtattgacttgttatacatatacaatgaaggaaataattcttttttatggacaaactaagcatttgtttaaaaccaatgagcgataaactctgatttccagtgtgcggctcttctgaacgttttaaatgcataaatacacaaacacacaccgcgcactcactacatgcttgggcatattcagcagaattcaactgtcatctcaactcaatgcaggtgtccctcgtcaaggcaggtgtacctcatcaatgcaggggtacctcattttacatgataggcattcttttaaagtagcatgcaaactcagtttttgtgaatcaaagttgattttaagtgtcccatttgagcaaattctatggtaactgtatgttcaaagggaagaatcacctccaaatttaaccttcttgagtaatccagactttcataattggatttacttaaagcagtattataaagtaattaaattgattttaacgaagaataaaacacaaagaaaaaacagtaagatgtgtggatcacattacacactgccaacatcctacataatgcaaacactgagatgattaagctgtctgaaaggcctcccatgcataatgatggaaaaaatataggaaagtttagagtttatattcttgtgaatcccattttatctactaattcaaatttttctttctcttttactctcaatttacaactaccaaggacacaaagagcattctatattgaagccatttctcctccagaggcataacaatgagtttcatggaagaagaatctcaattttctgaataaatatgaataagtaaatagttgcttaggtacaccagcatatatgtataatattattatgtaattgtaccattacaccctatttcaaggattcttagatgctaccagtataagacactaccacgttgtgtgccatttagagagaaaaactgccaaccaaattatgacacgtaatagattgtaagacacagtccaatttcagagctattaaaatgtgagaaatgtgtatcttttaatcaatgatatatggtaacaaactctcttctgctttatctccagcatttggaaaagtgcttggcaacagtaaacactctatcaatactttttgagtacaggaagaaataataagtgaatattcaaaacaatgaaataggtatgtatcttgcatttaagacaattataaaatgattggcactgatcaaacgttttaaagagcagtagttgctttatataccagattatctcttctttaaaattagagttcaagaaattggaatatcaataataaactatttacagacttccatcacatagataacatcatcaagtttaagataaataaaatcagatatgaatttaatgagatttttaaaaactagatggtgaaaatttctgttatagtttgaaatatatttgtatttgtctcctagttgacttatctctcaggtctggggtatcttaatgttactagacaccctataggcttctgtcttgagtcacatccatttgaatggaaaatgccattttatcattgctaacaacctgctgatgctgccaattacgaaccttcttcctaaatacattacaggaagtccactctatttatcttctctatctgacatccttttaagacattcccagtagacagcccttttctaaatgaagagagaatttaataacatctcattcctgcttaaatttgctaagtttaaagcaactgttttatatatcttctttattaattttatcattcatctgaaaactcttctcttttcttcctcacttgttctgccttcctgggctcatgagtatgaaactggaaactagatacgtcatttctgatagctttaccatctgacgctcagctggaaatggaagctacgatttccccaagccttgatctccatgtataaatgctgggcctgtcaggtctgagataaatctgtgtctcctctgtgcccaatacacaatgcaaaacagggtccacgcccctggagagtagctaggcaaggacatcatgttctatctttaaaataaaatgcacatcctcccattaaatggcaaatccttcatttctaacggttgaataggatggtacttacaaatgaattccacttggttaaatttagagttcggaaaaaaaaaaaaagtcctatccaaaaatacactctgccttggggccctttttgtctgattttgaattaatgtatttacaccctttcctctcagtatcttgtgagacaaacactagttgatataacaatatcagactctgaaatctgaaacttgaatactctgatttagttccttgtacagttatttatttaaagggggctttctttttattaatatgcttttcagggagggcactattgaaagcttgtgtgtttttcattttgtttgtttcttcaataatcaaccttccctttgccgcttccccagacaacccaggagtccctcctttcccacagggagaggggaagataatcccgaatgagaatggcccgttccatagcctgtctccttcaagattctctctgcaaaactaacataggtgggtcctctttttcagggccccttaggtctagagttcgagccgttcccatattgctggtgcttgcagccctccccacagcagtgctgggctgctccaggatggtgcctaggtgcccagtggccccatcatcctgactcccctttcctccaatctccccactgctgctcccaccactggcttcttcctcctcatgccagactttgtggccttctcctctgtggctgtcactccagcttttcctcctcctgctctctctaccacctctgccccaatgctgagacagcccagaaacatgctacccatggcagcatcaagggttgtgttctggctgctcacaactttgtgggaatctgatggcgcacgtctgttctggaggaacttgctgctcttgccctccgtggagcccacgtcttcacagagttgccctggagatgcctgctcaggttcttgctagcctaaccctgcctgtctggggaaaggcttccaacaagaacttgcataagagctatcctggtcatggtgaccatcaacacagaaggccaaggatggtcacccatgagcctgcctcaaattctcagtccgaatactttttgtctgcccctctgccctcccttcctcttgctcaaaaattaagactatatcatcagctacagtttcttctcttgttgtttcagatgctggttattgtaaaatgccaaggaggaaccacactggcttattgtttgttccctttgctctcctgtgtttattcctagcttcctgcatttctgcgtattggcacaaatataaggcttttgtttgaattttatatttcaaaaactataacagatattcatgagtttaatttaactgtctacttactagcagccatgcttgttaagggctgcaataaaccaactgaaaaattaagcactccacttcctcacatcctaagcaatgcattattttaagagtcctgtcattaggaattcagttggtactcataccagcagcagcagatcctaatgactccatttggtattcatacagatgttatcatgtatcacgccctccactgccatcagagaatcattcccattcaatgttttttttttaattccctgtgtttgataaatacgctgataatctttgctctgcacaataaaagaatattaaattcaggcctgactaatgcatggctggaaacataaaagaaactttcataggtcccaacaccaaaatactctgacctattcctactactccagccagctgatttttaggcattcttacatttctggacgccattctaaataatgcgaagataaaactctctaaattgaatcttaaatcttaaaatgtaccaaaccataactacctttgactgtttacttttatcatgccagatattcacttgattgtcttaacagccccatgaagccagcattattaacctcattttatgcaggaggaaagagaagcaaagaggttaggaaacacgcttggccacagagtgaggatgtggcagagctgggcttcagattcaggacttctcaactaccaagtgggtgctttcggacctatgtgtcagccagcaatgtaaccctacccctatctatctgggatggtcagttctatatgtcaatgaggcaagacctcagtccccagtcattcaatcaaacagaaaggttattcaatccaggtctttctgtgaagttattttgtagataagatgaaagtcgataacaataataaaaaaaagtctatcatcagttgactttaaggaagagcatcccagacaacctgggtgggcctgattcaatcagttaaaaggttctaagggcagaaatgaggattccctgaagaagaagaaattctactggtggacttcagcttcagctccggaccacatgtttctttctacactgctcttcctgatggcctgtccacggcttttggacttgcctgctagccccatattcgtataagccaacaccttgcaatcaatcaatcaatcaacctacctatccatattacacacacacacacacacacacacacacaatctatgtacacatccatatatcgcctactgtttctgtttctctgttggagcccatactggtacaccactgaagggcttttactgacgactgaagagctctcaggtgctaatactatgccaggcactctcacctgttaatgtactacaagtctatatgtgtactacatgccaggcaattactgaatgagccacagtctttaaaatcaacctccctcaaccccttaatgacaagcaatttaattctagcaacactcatggctatttctccttttgtaagctgggcctctttttatcctaacggaggtggaaagttacaacccttcctcttcacaatctgaagccactcgtgtttatcatgtcattgataaaaagatgataaaattatgtaaaacctgtaagttgcctaacactgtgccaattctgttcactgtgtgtaattttattattttatataattaacaagttcatgcaaaactcagtcattctatgtgcaagattaaagtgaagtaattcgagtattaccaaaatattattccttagacaccagtttagaaaagcctattcttctcttcaggttaaataacccacgctttcttaatgcttcactgtgaatcatgcacccagacttggaattacctcccttgtctgctgtggagcttttactattctttttttttttttctcattcaaagtagctaacattgcctttggtcttttaataaatgattctgaattgttgaggaattctggtttttttcttcttgttgttgttttgttttttttagatagggtctcaccctgtcacccaggctggagtacaatggcacgatcccagcttactgcaacctccgcctcccaggttcaagcgatcctcccacctcagtctctcgattgcaggtgtgagccactgtgccttgctggaatgctactcttaatataaaacaaatactatgtttactaaccacattcattcttgggttcactgtatcctttttgtcccactagagtctaccttctgattctccccttccaagcaaagagaatcttgatcctttactgtcagtcttgattcgagtgaatgagtactggcctatgaccatgggatgcgtacaaattatctggtctttaacaaaactgtctgcctgatgcttgtttccattcaggtggcttatgcttgcccaactttctcctatttcataaattttaatctgttttggctatgtcacctcctgcctattggtctaaaccaataactggtcacctatttgccactgaacatagttttcaacttttcactcatgtcattgatcaagagatgaataaaaataacctttttttggaataggtggggaaagaattccctatttaataaatggtgctgggaaaactggctagccatatgtagaaagctgaaactggatcccttccttacaccttatacaaaaattaattcaagatggattaaagacttacatgttagacctaaaaccataaaagcgctagaagaaaacctaggcaataccattcaggacataggcatgggcaaggactcatgtctaaaacaccaaaagcaatggcaacaaaagccaaaattgacaaatgggatctaattaaactaaagagcttctgcacagcaaaagaaaccaccatcagagtgaacaggcaacctacagaatgggagaaaatttttgcaacatactcatctgacaaagggaatatccagaacctaaaatgaactcaaacaaatttacaagaaaaaaacaaacaaccccatcaaaaagtggacaaaggatataaacagacacttctcaaaagaagacatttatgcagccaaaaaacacatgaaaaaatgctcatcatcactggccatcagagaaatgcaaatcaaaaccacaatgagataccatctcacaccagttagagtggcgatcattaaaaagtcaggaaacaacaggtgctggagaggatgtggagaaataggaacacttttacactgttggtgggactgtaaactagttcaaccattgtggaagtcggtgtggcgattcctcagggatctagaactagatctagaactaggaataccatttgacccagccatcccattactgggtatatacccaaaggattataaatcatgctgctataaagacacatgcacacgtatgtttactgtggcactattcacaatagcaaagacttggaaccaacccaaatgtccaacaatgatagactggattaagaaaatgtggcacatatacaccatgaaatagtatgcagccataaaaatgatgagttcatgtcctttgtagggacacggatgaagctggaaaccatcattctcagcaaactatcgcaaggacaaaaaaaccaaacaccgcatgttctcactcataggtgggaattgaacaaagagaacacatggacacaggaaggggaacatcacacaccggggactgctgtggggtgaggggaggggggagggatagcattaggagatatacctaatgctaaatgatgagttactggagggaggggggagggatagcattaggagatatacctaatgctaaatgacgagttactggggggagaggagagggatagcattaggagatatacctaatgctaaatgacgagttactgggtgcagcacaccaacatggcacatgtatacatatgtaacaaacccacacgttgtgcacatgcaccctaaaacttaaagtataataataataaaaaaaaaagaaaagaaaaaagaaaaagcgtttctccacagagtggagaagttcttttgggtctcggtataggccatgtcagctgcacagtgaaaaccaagaatgtggcattccttgcaaagaaaggagattcattttgaaattgcttctcaactttcacgtaaattatgcccaatattttaacacattgacaatatgatcagctttctacttcagaatgtgctgagttttttccctatctttatgcagttgtgaagtacctatgaaaccaagtggataaacacagtgttatgggctgaattatattctgccaaaagttcatgtgttgaagtcctaaccccagttcctcacaatgtgacattatttggagatagggtctttacagaggtaataaagttaaaaagagctaaaaataaataaataaataaccttcttatgtatagccgcagtatgttcaatctgaaatgaactttgaaatacaaaatgtactgatttggattgaaaagagcattactacaatgctatcccctgcctcagagactattcgctaaatattaattctattaaaatgaccattcaggagaaaagcactcttaatacctgatttgagaataagcatacttctgtttagacaataatagaaaacaattctcccattatttattcactaagcattggtagttagcatttttattgctcatttgttttcatttccaagcagatttttcaaaactagacttgattaataatatactatattatgtagtagcatttggatattataaaacattaaggaaaggtctagatagaggatacaaatatgttcttcctccactgctactgtacttcattttgatcactgcatgtgcaaaggtatgcatcagaaacttctagatgaaaactgctaattattacaaggatgccataaacaatcttgccttctgcatcactgtgtaatagtgcaaacaggaataacatgtcttggaccaaagtgtaaggaaaactgtgcttctctaagttgctaagttgatatttaaggacaatatgactctcaaagcccttcgagtttctcttttaacttcagctgctaggaagctcaaatcctgtctacaggctacttttacttacaatgtaataattgcatgaattttaacaagtcaccttacattcttttctaaagaaggacataagaatagcattgtagtttggaaggctaagatatatgtgatcatttcgggagctctgaccagcttcgctgtttggctggacaaatcacataattagagctaacattagacacttctccacataggaaattaagactctacaatgccttccctcttatccaagctcactctgatatttggtgaagtttaactgaagaatcttaaaagaaagcttttacataaatgctaaggaaggcataaaaaatgcttctgatttgcgcacacatgccgtataataacccagtgcagtgtctgagtcagagctgctagggtgtgggcttcctggggcggagcaccttagtccatctattctgttagttgtctgatgctttccttttgacaatcgattgacctgttttgtaggaaatgtggcactatgggtcttcatgattttgcatgattagccgggcatggtggcacatgcctgtaatcccagctactcaggaggctgaggcaggagcatcacttgaacccagaaggtggaggttgcagtgggccgagatcgtgccactgcactccagcctgggcaacagagtgagacttcatctctggaaaaaaaaaaaaaaagaaagaaaatgcactttttatgctgagggacaggcagtgcaaaggatgtgagtctggctgctgtcgcaggttctgacccctttgacatggaaaaattccaagtaggaaggttcagtagtcatttggggtttccagtgccctaggactcatactgaactttactgatcaacacttgaactgcacagaaatgcagcttgtaaatgcaggtattatgtattatttgcaaaatggtcctttgaaaaattaagctgctctcctcagcagcagctgccatcatctccctgaaagaaggctcagtggtaaacgaatggcagcccaggggctgcaaggaaagacttgtatcaaaaacatgtgcaccacagacacaaaacccactacctgtgccaggtgttagagaactctgtgttgttatgccataatgtgaagtttcaagaagaggtgagtatctgcaaagcaatttaacattttaaaagctgtaggtggtaaaggttaacctccctggtgattcatcaggactgtcttgttaagagtggcagaatttacaagcacaaaataatagctggcaggagaaagtgcccaaatgaaagaggaatagaatccatctacagccagctcaccaagcctctgaaacaggattccttggcatgtggaagtaattcagagatcaatgggagtaatatattgctctttagcccaaaggagaataaggctacattcacacaactaaggaatagtgagtcctgatttctacaagagattagcctataaaaggaagactgtcctatttattaacataagaacctagcattattagaggcttagggcaaaactccaccttgacccatgcgaaaatatttgcccagaaactaacaatcaattgttttacatttagctaaagttttatgcttgatgacaaacatagtccataaatgccacttggtaatttgcattggtaaaaactagccaaaagtcacacttagggcatatgtgcttccaaataccgcataacttgttataacatgtcctcaaatttacaactatgctgtatgtccccattaaaacccaataaataatttctcttcaccagtgattatgaagatttttcttcattagagtagcttccaatcatgcagtgatttcaaaaggtcctatttttaaccccaataaacatagttgtatttctcaccaaatgggccctcgagatcagaaatcactaggatatgaaagagatagctacatactcaatcaggaaaccataaatttaatgaggcaaaatctcacagggtcatacatacccaatggataacatagggaaacaaattcttagcttactgtttctctattagggattgatttttgccctgccaaaattgcatatccatgagcaaaataaattgttatggctactttaagtcacttaattttgcagtactttgttacacggcaatagctaacccagaaatgtccttaaagagatttcagagatgcatgtgaagggctgtcctctttacagagacacacactaagtaggaccaaaatagacaagagaaaggaaaaacctccatctgcgccccaacacactgttccccactaaccccacactccatcagagcctagactcacaagccctttactgtgttctgataaccactgtgacaaaaccaattcaatttcaccccttcagttcagaggggaaaagaaagaagagaaggaagtaatttaatgacaaagacagtgtcttattcagctatagcccctactgtacctacatacaacaggaaactttatataaagaattattttaaacaaatattgaattctagatagcagccttgattttcacaatgttagcaattttgaatccacttttttgtgtattctgatattgatcaaataagtaagtatactgtggatagtgggaacaagttttcttatagtcagagaagggagttataaatgcagaagcgggaacactagaataaacctgtgaaactggactggaattggagatgtcaatatgaaccctagtttctattagatagattggtagacagataatagatgatcaatactgaagtagatgtggacagatatacgtatgtatatgtatatatgcacatgaaatacatacacagtctagctctgtccaatgaacgggcctagaacacacaacacttaagtagtaatgagcacatgtggtatccggatcttggtttctaaataccatgtccgcaatcaaaggaaccagggctctcttgaaaactggctgattctaggttggggttgtagaatgatgaaatgattctagaacatcttgctatactggaaaaagaaataatgaggaatgatggggatatgtcaaatgaaaacaagccaacttgaaggggatcccattgaccaaatctcagataatttgacaaaaaaaaatgtgaataatcaatcataacctactgaataaaataaaaatccatgagttcatactgattaaatataaataaggtagaagagaaaggtcttccttatagaggaatgccaagtaataaatgtagaaataatgatgcatttctagaaaatcaccatttggcaagcaccactgtattaattgcttctggtaggtaccaccaacgaatgctaaaagtaatgtctgagagcttgatgaaaagatgtctacacggtctcaaaaagatacttattaataacttcagtggagaaacttggcagataccctcttaaccaagtgatggcattcacatcaccagtaatgggacaaatcaatgtcacctgcctcttgacatgatgtgcaacgaactgagaaggaccagcatctctcctgggtattcctgcaaaaaaatgtaaaacttgaatctaatcatgataaaatattaaacaaacctaaactgaagaaaagtctgaaatgctggcttttattcttcaaaaatgtaaagtttgtaagggacaaaacaagcccaaggaactgctacatattaaaggagcctaaagagacatgtgaactaaatggaaaatgcatgagcttgaagtggatcctggaccaggaaggtgaaagagccatcattaggacaacgtgagaaattcaaataaggtctgtagattatagcattgtattcatgttaacttctggattttgatcattatattatggatatgtaagaggatattcttgctttctgggaaatacacactgaagtatttgttaataaacatcatgctggccgtgtgcagtggctcatgcctgtaatcccagcactttgggaggccgaggcggggggatcacaaggtcgggagtttgaaaccagcctggccaaaatgatgaaaccccatctctactaaaaatacaaaaaaaaaaattagctgggcatggtggcacacgtgtgtaatcccagctactcaggaggctgaggcaggagaatcgcttgaacccaggagctgagattgcaccactgcactccagcctgggtgacagggcgagactccatctcaaaaaataaatacattaattaattaattaaaataaaataaaataaaataaacatcatgcctgcaacttactctctgtagatgtgtaacacatgtgttatacatacatatacagaaaggggcagatcaggcagggtagggcagggcaaagcaacgtggtgaagtgttcatgtttagggaatctgaatgaaaggtgtaagggaattctttgactcttcttattatagcttttaagtatgaaattcttatgtcttaaaattagattgacataaaaagattttaaaaaggctctcgataatggaacagattaaaacgttacatattatcatctgacagcagttaacataaaaaaaaaccagagccacatggatcaatagggatatcaatagggatcaaaaggcaagttagataatgtcacggacagcatggtaccatttacgtaatttaagacacatacaggaaacatcactacacgttatttatataaacatacaaatgtaataaaagccatacaaacctggcctggatacctatttagtttcatcatactgatgatctctgcggtggagaaaaaggaactgagaatgggagtaaaaagcaaaagccagggaggggagttcaaatccctttggagccagggctatccgacgcaggcacaatctggacagtcacacagggccttgagattggtttaattcactgcctgatgccttgaaattcttaacaattttttaattattaaattaattaatcccacattttcactttgcactgggccccatgaattatgtagccagtcctatttcttttacttctttcataaaaaaataactgaaatgaatttgctatttctgggtagtacacacccaggtgtttactgtattagtctatgtactttttgggatttaaatatctttttcaaatttttaattatggaattgaattgagaagaaccagcttctctcctggggattcctgcaaaaaatataaaacttgaatctgatcatgataaaatattaaacagacttaaactgaagaagagtctgaaatgctggcttttattcttcaaaaatgtaaagtttctgaaagacaaagcaaaccccgggaactgctacttatcaaaggaacctaaagagacaatctgaactagatggatcttttctcaagttcaccttaaggtgttactgtagcctgtggccataaaactgggaaaaaccccataacaaatcaaaattcagcgtttcaaagtggggtggccctacaggagagctcagttaaaagaaaagctctctgcctgggacactcttcccttctgcgagaccttagcattacttcttcagacattttcttaaactccccatctgtaatccctcccgtcctgcctggactatcacctcatccctcaccctgttttggtttttgcacagcatttactactgtctaaaagtctatcacttatttacaaagttacgcattttttattctccctcatcagaatttgagccctgggaggtcaggggatctacatgcctcgcctcctgccatgtccgcaacacctaaaacaggacttggcacacaagacatctaatatacggtgaagaattgaacttaggatgagaggcagagacagagaaagactggcaaagatggagagaggcctaaaagtatccatccttttggagaaagctcagagcaagatcttccaacaggttctccaatggcctgcagtatgcaagcacagtacaaccacagtcaagaaccagcaggccagtggcacactggttcttgaaaatcaccatctccagtcacgtcctgagaacgcatatcatggtaacactccctaggcagaattaggagccacttcttcagatgcagcggcctccctaggtcatcaattctggttgtctcaaacttcacaacaggggaaggctgtgaccgaatctcatcctcatgaggccacaaggcaaagacacctgcaaagatgaggggcctgatgcttaagggcggggattccttggcatctccttggtgagctaggattgccagagatctctcagaatatttgcactttctgtgcatctctgctcttgttcatactgttccaccccaacttccaacaacagactcaaacttccctcatacacttgctatgatgactgagcccactgtacaggcagggtcctggcaaatggggcaagctgggtcctggcagataagggtttaataaagggactatttgcctaccccattgcagggatatggtacgactctgtctgaggttagaaacagaagggtagtgaccaccctttggcctgaagggccagagccctgaggctactaacagggtgtcggggaagaggagaagacctcactcttctgcctccctctggtctcttgatactcctcattggctgaacccacccagaagccagagggcaggagatcctgatgtggttcctacagtggacttccctggcactaagggagatcggggagtggatccaggagccaccgatagaagagactctgcatactcacactaacacttataacagggaatgtggattctacccctttttgtgtgagttctgcccttgcttcctgtgtgctcgccttgtctccctctaagagtttagattctaggctcgtcaaggaaggtgaacaacccctaaagagcttaacatataatcatacatcatatcatagaatgacaataatttagtgatgatgtaatagattactgaacaggctgccagatttttctatattaaaaaggaccccaaagtatgagaatttatgatattctgataatagtgatagcagtgggtatctatctcattaacagtagccagaattctacacaactaatttacatttctacacaggatacagcattacctagtaagaaaagtaaatgatggagaatagtttgctattcaacaaggaaactgcattatctgccctgcgaacagtgcgcaaaaaaattctgttgggtatttattatatggccgttatataaaaatattacagaaataaaaatcctaggaagagaaaaaaaatcttcacaaattcttataggcctgaatggtaatatgctagtgcacaatcaattctgatagaaaataaggtaaaagaaaaaaccttgcttttttcttttagtgtagttttctaagtggaataaataattcactattccttcaaccaagaaactctctcgcttattatttaaaaatatttactggttgcagttacaaaatatggtgcatttttccccctggcttgccctttgtattgatgtatatcttctgattataagaatggtaactcagaagtcataaagaaaagttttttgaaacaccatcttgctttagagacaataaggaaagggtaatcaatccaagtttgaaacattctgggtatatcttgggccatttagaataatttgaaataccttaaactagactaattcacatcaccttctatgttcttaaaaactctcctaaaaaacatgttcattaccctattcctagttctgcagcactccagaaggcagagtaacagatcaagtcaccacttaccaggttcaggtcctgccttccataaggagaatgtctgttctcccgacagtgtttgtaatactaattgctctaacctttaattcattaacaactttgcattcctttattcattcattctgacaacaaatatttatgaggtgagacagacctaacgcaaataggtattcaatgactgttacagtcagtgctaacctaaaggctacctcacaaaagtggtaattaagtgaagtatgaatagtgagtactagtaattacttgaaaccaaaacccagtagaagcagcctctccaaatgcaaacctttcataggttttaatctcattttcaaaggttgttatacaaatgaatagcaccaacaaaattcagtagaaaaacttttgcatgaagaccaaacttgggtatctttgagtctttgtcattcaaaaccatttttgcacaaaaccactatattcccccatctccccacagaaaagttgattttcatcaggggaatgaaatgcctggctatcctcctttaaaaagcaggagttaataccaattctaatcattatttttactgctttatggtacatcttaggttactgtctcatttttatgaatatagacaataatcattaattccccccggtagtagtacagaatcatctccctccactgcaacgttttccctcataaaagacatggatgaaaaacatttggggcacctaattcttcttttatggatgatccatgagcataaaactattaatgtttatctcttaagtgtaattaccatatttcccacatcaatgcccacggttgaacacatcaattaaaactagatatataattttcacatttcagatgaatttaattatgtgaaatctgttttatgccctcttgtctatatatttctggaggtgttagtttgccagttctagaatgggttgtcgaatacgggatggctccttctatgaactaacccaatcctccaggcagctgccattaagagcagagaagccatgactgttcagattattttatgttgaataggtgaattctgttcatttttagaaaactgatattaagttcaacttacctacaatattttttattaaaaagtcttcattatttaaaaagtatttcatactaaataatctcttttgtccccttcctaaccaactggtagttcctttaagacaaaagttaaaagcaatacagttccccaaattaaaccaaaagtatgcacaagaaaaataatacaaataacaggaaataaatgaaacaactgaaaaataaaaaaaaaattaacaaagccagaagtcagttctctaaaaagcctaataaaattgatgaccatttggcaacactgatgaagatttttaaaaagagagaaaaccaaagttaccaatatcaagaataaaacagtgaatatgactacagattatacaaaaatttaaagtatgagggaatgttgtgaacagcattatgccagtatattcaacaacttagatgaaatagagaaattccttgaaaaatacaacttaccaaaaggacacagaaagatatagaaaatctaaataactctatatctgtttaagaaattgaatttgaaattaaagaacttcccaaaagaaaactctaggactaaatgtctccactggtaagtttttccaaaaaatgaataaagaaaataataccaatcccacacagtgtcttagaaaatgaaggagagaacacttcccaactcatcctgtaaagttattataatcctagtaccaaaaccaaagacattataagaaaattaccaaccaaaatccctcatgagcacagatgcaaaaatctttaacaaaacattatcatctagaaacatataaaaaaaaatatgccgcaatcaactagagtttatttcaggaattaaaggtttgaaatcagcgtagtccaatatattaacacattaagtaggaaaactcatgatcatttcagtagactcagggaaagcactgacacatctatttatgtatttaacataacccagttgtgttactacacccatttatcctaaaaactttcagcaaacaaggaatagcattttcttagcctttaatgcacatctagaaaaaatgtatagctaagggcatttgacagtgaaattttaaatgtttttcccttaggttgggaagacaaaaaagtccactctcactatctttattcaacattgtattggaggtccctgcctgtacaatcagataagcaagagaaaaaaaggtgtacagattggaaaggaagaagtgaaactctattattcatcatgtgtatgtaaaaaatctgaaaaaatctacaagaaaactactagatctgacaaatgaatttagcgatgtttcagaatacaaaatctattagcaataaaaattgttaaaaatgctttttacaagagtatgaaaaacatcaaatacatacttggggataaatttaacaaaaaacaagccagctttttatactaaaaactctaaaacattactgagtgaatacataaatggagggatataccatgcatgcatgaattggaagactcaacagtgctcagatgtcaattcttcccaaattgatctaaagattcaataccatccaagtcaaaatctcagcaaagttttctcaaaagaaaacacataaaaatacaacttgaaacagtcacagacctaaacatcaaagctaaaaattgttatcagaaacaatgagaatgccaactctgtaacattcattctttctataactcacaattgcagtctcatcatgaaaagaatttcagataaacacatattgatggttattctacaaaattcttagagtagtcttcaaaagtgtcaaggctataaaagacaagggaagactgaggaactacaacagattggaggaaactgaggagttatcacaaccaaatgcaatgtagtatcccagattggatcctggaatgaaacaggacattatggggaaaattgttgaaatccaaacaaagtctgtagtttacttaatctactgtaatgttcatttcttggttttaataactgtaccatggtcatgtaaaatgttaacatcaagcgtagctgaaggaagtgtacgtaggcactcaatgtactatctttgcaacttcctataattttgaaattatttcaaaataaaaagctttaaaaagagttattagaatgaaagagacacttcttgtaacacagaaaggaataaatgtgaaagaaaaattggacttcatcacaattaaaaatatctgttcatcaaagagtaccatcaaaagaataaacaagtaagccacgaaatgagagaaaatatttgcaatacatatatctgacaaatgacttggatccagaatataaaaaccactctggtactcaataataaaaattagcaacaacactataaaagataggcaaaagatttgaagaaacccttcacaaatgaagatagcacatggccaataagcacatgaaaaagtattcaacatctttcctatgtaggaaatacaaattaaagccacaatgagataccaacactcgctcactagaatgaataaatgaaaaagactaacaacaccaactgttgatgaggatatggagtaacgatatggagtaactggaactctaaaaaaccgctgactaagtatgtaagatggcataatccctttggaaaactctttgggagtttctttaaaagttaaacacaaatctactccataacccagcactttcactcctaggggtttatacaaaagaaatcaaaccatgtatctacagaaattcctatattacaatatccacattcattttattcataataaccccaaactagaaatagcctggatttccatcaagggatcagccaactgcgctttatttatatagaagattactattcagcaatgaaaaaaagaattaatgatgcagacaatgatactgatgaatctccaaaatattagtactgtgctggataaaaagaagccagaaacttaaggcacatactgtatgaccccattcctacaaaattatagttaagtaaaggacaacctatggtgacagtaaccacagcaaagcctgcttctgggggccaggacagtgactggaaagtggcatgggggagcttttaggggtgatggatatgttctgtgtcttgatatgcattcatcacaactgagtgaaaggtaaatttagtaactgaacacttcactgcatgcaaattatacctcaaagaaagtaataccgttttcaagaactaaaagaaccattataagatcttctcaagtaaacatttgagaagtgttttttccttcatgcctagattcttttctacctctggggctaaaataaacctcacggttccaggcctccagccactcctctgccaacagtagtctacatctattttctacccagccttttggagctctcagccagggaaggctgctgtgtgtccctaaaatgcttctcgaacgtagtatactacattcatgcttatgccattcgttcctagtgcagcacccggagtagcaaccttataaatgtttctgattttacaaactttaaaaaagaatagtaatttctgccctataccacctttggaagaactgaaaactaccatgccaaattcattatgttttaagctaactcttcctcaccccacaggaagcacagcagtactgagctccatctccattctagataagatacaccgaggaaatctgaagacaaggcagaattggggttctctttaacctggatctattcagaccatactgctcaaagttcaatggctccttagagagctacaagattttgttcacacagtgttgataaggtctgaatcacatttgtgatgcttaccacagtacagattgttaatttctacatattagcttttgatgttgaaaagcataccaagtagctcgaaagaaaaaggctctggactaaagaatcagcaagtattttatttcgttcacattctacccaagtactctcaagagccacaattgcaagctctataaacttaagagtaaacttatatttatgcaaaaggaccaacgaaagatgatcaggatcctctgacgtctagctggatgtagagtgaggtccaatgaattcactcaaaagaaatatagcacaaagcaacaatggttgttcaaaatggcaaatgaacatattgttcgttcttttccaataaaaattcaatttttctttaagaaaaaaattcccaaaatataaaatttctgcatccttggtttcttacatttaaagaggcaaaaaaagaaaagagaacatgttatggcctaccgcaatatgtgtgctccaaacatattaaatgtttgctgcctctagagagtcacggtgtataattcacttttaattttataattattacaattaaaattaaacaaaggtaaagaaaaaaatcaatacctacctataaaagataggaaaatctcactttaaggaatatctctgctttctgagtatagaatggacaagagagaatctgagcagatgacttaatgcagtctactgggagtgaaccttcctatgaatcggcctgctagatatgaccctcaaagaggcatcagacatttctccaacttaagctattcccatgtttattgtaacattcctcccctgagctcacctgccctgtcctttccaagtctcactgaacaaacttcggtgttccacactggactgggggattcggaaaatttcccaaaagatatgatccctgttgtggggggttaaattattttggaaaacaaataaaaaacatacacacaaagacaacaatgtatatcctctcccttcatccaacacaaatcttaaatatccttcaaggttccacttgtccatcagctcctttgagctgttttcctagagttcccaaagaaatgaaccctgctacccatattacgattagcatctttattatagctcctacttacaattcatgtctgaaatatatgtagtaggctctaagttcctctctagtcctctcagaattctttccatggtgcttagcatagcaccttgtatgcagttagtggtcaccaaataatagttgtattctcaatcttttcatttaagtctggagtagggaagagggctgtcatgaggaggagggttaaggagtggaaatcctgcttctaattaccagcaccattctccagtctgtcacattacttataaactcaaacttcattttacctttgcttactgcaatgaattcaacatcgatctggaaaaaccgacatcatgaggtcaatctatcacgtgctatgctgcagatttaggaattattaaaatgacatatagaacccaaaatgctacttaatcaacttaattttcctgtgtccatacacaccaaaaatgatttattaattttttttttttttttgaggcagggtctcactctgtcacccaggctggagtgacatggcttgatcatggctcactgcagccttgaccttccgggctcaagcagtccttccacctcagccacctgaatagctaggaccacaggtgcgcgacatcatgttcagctaattttttacatttttttgtagagacagggtcttactatgttgcctaggatggtctcgaactcctgggctcaagcaatcctcctgcctcagactcccaaagtgctgggattacaggtgtgagctaccacaccagccccaaaggagaatttttattttagaactacagcatgaagtataaatgactacggttttattttattattattgtacattttttttccttttgctcacactgatttattaaaatttatgtcaggcttgacatggatgatcaatccttattttttcaagcttactaaggatattttcctacaaaataagtatataaatatgtttatatgcaagcccttctaaggaatgattctcatcatcacagatcatgatctaggaatttctgtcaattactcttgagctctttgaggtcaaggactacatattaaagtctttgtactttcagcacatggcacagtgcctggcacatagtcggcactcagtgaaagtttgtgaaatgagtgctctgccatgagtcttaggcagatgaaagaacaactcaaaagtgaagacagacagtatgctgaactctcagccttctgccaccacggaaatatgtctttacatgcttccacagggttcaagtcctggccctcactgaggctgtctgggcagagcatgctgttcagaagtcatgtgcaggtagagtgcagggatgctgcatacaagaacatgattaaagacccagtccctgacatgggctcagcacagaggagacattcagtgaatgttcaatgaaactgcttatgttgttctaaagccaacaagttgaacttccattcccagggagttgctgtactatcagggaatcaaccaaggtctcacaactatggatcaggaaccaataatgttgggatataagctgatgtcccttgcaactgtgtagtctttgcaggcattttgattaatatctgaaaaagctgctcacagttaaatgcaatcatcatttagcaaacatgtattgagccccaattcaactattcaaggaattgaggatacaaaaataaataatttgcagtcatcagtactcatgcaactctcaggcatggggttacagctgtagcataaaccaatgagtacgataccagaatctaaatatatatgcctggaaaggaaagcgagagagctagtgagactgcaagtgcaaagtgcacatacaggggtgcaacagcacaaaagaaatttaagcagtgccattgctcccacctgcccttctccccagtaagcatgcacacccgagtacactggagtggaagcccggggcctgttacctcctacagtcaggcactggttctttacgcttctcatttctctgcactgagctggatgctactgtttaaagatacaaatttttcatataacaaagcctccaaactcaaaccacctacttcaggcattattaatttctacatacacattacacatacatacatataggaccgggtaaattagaatacggattagctgttttttgtgagagatttagggagcctcagggacaatttcaattgtgatttctgcttcatactctgagtatgagtctaatggttctgtggaacaagcaaagtgcttcagaagcataggagctggtgcaaggggcaagcctgccctgcctgggggttacagaggattaagtatggtctgtactgtcacgattcaacaacctcttaaaaaatacaatatatgcttaacaaggcttctgttgacctctttctggaagcctgatttctttcctccacttatgttaacagattaaaaatttaaaaaaaaaacataatttttttaagtaaacacaatcaggattttgcccccaaatgtaaatctccaaaaaatctgaagtgcggcatcacagccaagtgatgccaatcctggtctacttctactgcccctccaactgagaccagcaatctcacacaggctcagggcataagctatgtgtagggtggtcctagaattgttgagagcctggactcctacctccttaaaggaaaggatgtgaaaactgcactatggatatccccactctcatcatgcccctacttgcacaagccaaagcttgcttcaagtcaaaagcttaggagatgagcaattaaacaattttccaaaggtttctaagtgagtcagaaacaatccagccacagggcctctccagggcactctgaaaagtactaagtgtcatgcacacatgtgtccattgcagcactattcataatagcaaagacatggaatcaacctaaatgcccatcaatgatagacttgataaagaaaatgtggcacatatacaccatgggatactatgcagctacaaaaaagaatgagatcgtgccctgtgcaggaacatgaacggagctggaggccattatcctaggcaaatgaactcaggaacagaagaccaactaccacatgttctaacttataagtgggagctaaatgatgagaacacatggacacatagaaggaaacaacacacactggggcctttcagagggtagagggcagaagaagggaggggatcagaaaaaaataactaatgattactaggcttaacaccagggtgattaaatagtctgtacaacagacccttaagatgtaattttacctatgtaacaaacttgcccatgtacccctgaacttaaaataaaagttaaaaaaaatttttttaaatactaagtgtcctaatcagagaaccatgaatgtacatactgagaggccccagagcacgtgggagactgatatggtttgggtggttttgtgtccccacccaaatctcatcttgtagctcccataattcccacatgtggtgggagggacccagtgggagatgactgaatcacagggacaggtgtttcccgtgctgttctcatgatagtgcatgggtctcatgagatctgatggttttaaaaatgggagttcccctacacaagctctctctctgcctgctgccatccacataagatgtgacttgctcctccttgccttccgccatgattgtgaggcctccctagccacgtggaactgtaagtccaattaaacctctttcgtttgtaaactgcccggtctcaggtatgtcttttatcagcagcgtgaaaacagacttatacagaggctgtttcatgcttcagagtctacatagctattgtggggcagatgtactaatatgggaagggaaattaaagtttaagactaaataacttcatgaaaatctcaacgcagcaggtaaatggcattatgtaagtttttaaaatatataaaacattaagccagggattcttccttgaatacaagttcaaggaagcttgaacttgttccttgaatacaagctctttgtcctcacagacaactacaagggaaagctgatatttccaggtcatcttcacagcacatactcacctaattacatttctataactagaacaagttgttgttctcgtaaactttgttttccagtgtcagatggagcttgaaagctgccatggatgaaagactccttcaaaagttcagtaactgtatctgtgtaaactaagttaggttcctctttttatcgtatcacttcagtaaataaggccagttgtgctcatttgtcaacaggaaacacagaaaggaaccagaaaacaagatgcagcctccggaggccggtcttggccatgtgctgggtaaggtaacaccatggctgtgtcttgagaccaccccaacctcagttcacttgaatgaagaattttataatctcaactctaagggacctgtcaaattagtccagggtgagctcagacccactctcttgaagtggcagcagcctttgatgataacaactctgaccgcacaaacactacacagcagtgtgcgactcacacatcacagaaacaccacaggagccacactttcaggtctagaaggaaatactgtagattaaagtcaacttttaaagaagtaaaaaaagaataattgacatcagtttaatacattttggacaattatttaagaaatggcatgcgtaaatgaaagtaaaaactcagcaaggtgaagttgggagtttgagaccagcctgaccaacatggagaaaccccgtctctactaaaaatacaaaattagccaagcatggtggcacatgcctgtaatcccagctactcgggaggctgaggcaggagaatcgcttgaacccaggaggcagaggttgtggtgtgccaagactgcaccattgcactccagcctgggcaacaagagcaaaactccatctcaaaagaataaataaataaaataaaataaaaaggcttagcaagggtgagaaaattcagactcattacgttacttaatcaaaattcataaaattaattttggagcaattcagctccagcaacagaaagaacctaatcatccctttcatcagtaactgcttatcttcttcattttaattttatgttgatgtgcttatttatttttatttattaatgaatctagtttcttgttaccctggacttcccatattaataatctgaataaacaaccttattcaacacatatctttttaccaaaaaatgtcctcttagacaaagcacactctgacatcacgttgccttgccttcacttgatttagactccaagttcacagtgcaataaagtacaaggcaattgagaaattttaaagcaaatgtgttttgggtacagcattttacaaccaaaagagctttaaaatggcatttctgaacaactgaagaggctagaatgccaacaaatatctgaaaatgagcatgacattaaaatacagtttgacatgttcagtgaaagagaactgggggtaaatgcgccattatacattttgaatttttagctttttttttttttaatgagtatctgacttcttcatgtgttacaaactcaggaaagcagacagtcttgggatattaaaatagataaagtgttttcaggatgagatggagactgccacagaactgtacacaagcatctctctaaacttaaagaaaacactgattctgggctaagagagtgtttactgtgtagatgaggtctacaggataaactcaatttatccaaatcctgtgccttccagccaagaaactataaaagaagactttgtagaatgaagcaaaaagtcatacttcctttcctaaggattgcaacctgttcacaagacaggcagagctgaacagctggtccccttccagggctccaagaaatgtgaattccaaggacaaggtagccctgaaatgcctgcctcatgggatcctgccctgtcagtagtaagcatcttcaaagtggctcctgcaggttggtctcctcaatcacagagttcagacagaaccctgacaccagccacgtgtaccatgcggtcagccaaatgtgtaaggaacttgttttgagaggagagaagaaaattctatagtaggcgagacaggcttctctctcctgctcctcctccctttctttttctctctctcctctttcttccctccttctctccctctttctctttctctcacacagttcctacatttctgcactgggggacaaaccaggcttctgatcaaaggcaatctgagacttgggttcaaaagctttgatgaagattggtacctgctatgcagatggggggagggaagaagagactagcctaggggcttttatatttctttaaagcatcagccattaatgggctaagtttaccactgggacccagagagctagtccccaaacacaagctcaaaatgtatgcattttccaattcatggttttcaaggacatgttccatttctatgaggctctaatgagatctgagagatgtacatatttttttaaagtcacacttacaatggctctcacagcacatccgggagcaactcagtaacttgtctaagcacttacatactgaagttccgagaaccaccagcttaaggttcagaattgaaatttacagacccagtctttgcttttttcaactctgtaatcttgtagacggttcataggtttaagacattaaataaccatggattatcatgactctagaatcagttggatttgtgacaaaaattagcaaaatgatgaaataaatgtaaggacccccttcccatctcattactttggttagtttatgccccaggtgggatgggtcaggacttaacagtcatccattcatggaacagttattgagctcaagccactccctggagatgtcaagaaaagtgagctgctttctctgcaggaaagccaaagaattaggctggtgcaaaagtaactgcagcgttgccattaaaagcaatagcaaaaacagcaatttctcttgcacaatatatggatcttttataagggagaaaaaaggtattattgatcgatatggctagaaacaggctggacctttgtgggtataaacccagaagggccctggtgttgaggtgttggaagaacactgatggattctttatttttttcattaactacttaaaacaacagttattgatagggtactgtttagagatcactacaattcctttgcagttatttgacatatataaacatactataggctgggtgcagtggctcacgcctgtaatcccagcaccttgggaggctgaggcgtgtggatcacctgaggttgggagtttgagaccagcctggccaacatgatagaacccagtctctactgaaaatacaaaaattagccaggcatggtggcgggttcctgtaatcccagctactaaagaggctgaggcacaagaatcacttgaactcgggaggcagaggttgcagtgagccgaaatggtgccattgcactccagtctgggtgacagagtaagactctgtctcaacaaaaccccaaaacccaacatactacaagtgaaagtaatctgcattgtaaggtttgttatgtgccctagtctgcccacaggaaccctgaaaaacaaaatgttaaatggcacagactttttaactgcaaatactaggtgcatttaccttccttaatacagcactgtgatcacatatatgatggtatagatcaagcttgtccaacctgcagcccatggacgcatgcaggccaggatggctttgaatacggcccaatacaaatttataaactttcttaaaacattatgagattttttttgcgatttttttttagctcatcagctattgttagtgttagtttattttatgtgtggcccaagacaattcttcttcttccaatgtggcccagggaagccaaaaaactggacactcctggtatagatggtgtggctcattctgctcatccttctttgagaaagcgcatttcagaagctatttctcctcattccagattttatgctgattaaagaaaacaagatttgcacacagagcatcctctagttatttgggtaacagacacagccatgagaatgttccgctccacaggggccatcagtgcaaatggccttccccacactacatcgaccacttccccacagcaagcttggccaggatccagccaaccagtgctgacgtccttcgctcagggaggtgttgggccttgcacactatggccccttacacactccattgcaattttgttcatctctgtccagctaaactgtagaaacccggagtgtagggactgcgtcttgaattcatctgtgtctggcatgtgcaaaatgctccacaacatcagttttacactcttaggataagaaaattcattttcaagagttttaatgactacagagaggtggcaaggtaaacagtttccacgtgaccccatagacttctccattaatcatagtttccaattaacttttttgttgtgctacatagatcttcttgttctattccagatcataatgtacagtttcaataatatgtttttttaattgatgttaaatatgctcctagaagctgcactgcaacaaagtaatttcagagaaaggcaaactggattcagttttcagataataaatatatatgtgcataattaaaagagattgatgtttccagaaaggagcacaatggaatgaagaaggtggtgcagaaaggctgagccctgtgctattagtgatgagtttcaccggaggtctttttttttaaataaaaacttaatttctctgtctttgaattctatgagatctctttcagacaaacacaacattctgaaaatcaaagacttggggattacttgggaaaagttcctttgagaactcatcaagaaagcaaggggcttaaacttgagacatagtatttagcttaagaattggaaagactctttttttttaagttctgggacacacgtgcagaacatgcaggtttgttacataggtatacgtgtgctttggtggtttgctgcacccaccaacccatcttccaggttttaagccctgcatgcattaggtatttctcctaatgctatccctcaccttgccccccaccccccgacaggccctgacagacagggtgtgatgttccccttcctgtgtccatgtgttctcattgttcagctcccacttatgagtgagaacatgcagtgtttggttttctgttcttgtgatagtttgctgagaatgatggtttccagcttcatccatgtccctgcaaaggacatgaactcatccttttttatggctgcatagtattccatggtgtatatgtgccacattttctttatccagtctatcattgatgggcattaggattggttccaagtctttgctattgtgaatagtgctgcaataaacatacatgtacatgtgtgaaaggctctttcaaatacgagacttgacatctggtagaacaaataattaatggtgtccggaggtagttaaaaagggagggatggaagacaagcttcaactccagtgccaaccccaactgagcaccacgaccatccctgggtccccgtagctatcactgcataatatccaccatgcattacaggctttggaggtagcaccagcatctctagggcagccagtcatttctctagaatggtgtagaacaacagcaccaggaactgaaaggaacctgcagtacaacacagcaggtgaggaatagaaagccttgcccgaatctcaccaccagaggtgcccttggactgggactcaggtcacttctttctgccatgtgcctggtgggagtaggatctagacaggggtatccagatgaagtgtcaggtctcctttagtcctgtggtttgacatgtttagttcaatggtttcacactgaacactgacccgacaaatgggcattttcatgtgtggaaggtgaatgaacatgttctgtgagctttcataaagttctgcttaaaaagtttccaagcagatcctccctgtggccccgcatgtatagagctataaagggaattccctaaaacaacagacaaacctccagggcctccacggtgctgcacacatgttcttaagcatctcacaagcagccaatgacatgtaaagcaaatcacctctcaagaaccacagaagcagggtaaggaaagggaatatcccacaaaacctctaactacaggagcagagtaaggaaagggaatatcccacaaaacctctaactacaatgagaaaagcacccagtggggaagaaccctgccccctcagaagccactgggaaggggcacttccacccttgctcagcccctcactcacaaccccctgggcaggaggaccgtcttctattagtgcctctgtcggggagaagaatgggtgcacacggctcagctaggtccttctggatcttcccaaggagaaagtgaatctgtgctgctctcctgccatgcagaaaacttagctagcagggtctgccctcaggagaagctgtggctgctaagcatcacctgagaccaatgtgactgggatgtttaattccagggagaagaaacacagactgaaggtcaccttctctgaacctacatttgactgtcatgtataccttatttctcaaaaagttttgaattcaggagagaaagaaaagatgtgtgtttatgagcctcttaaaatcccagcacattcatgtctgaacatgggaggtcatctaatgtttcgcattagcacagggatggcaaatgtctactgccttctcttgcacatgtggcattctccagagccatgaagacccatcagaatccctgtcaacatggtattcatggcggggcagctacttggtggccaccactgcaacatgaaatatcacctatttgttatggctgacctttgcctatgggacactggccatgtcactttcggaagaaccccttcttactgtgcttagccaaacaatttacctatagtcattattctcattcagccattctacaaatatttcataagcactttataactcttttaagggagaggggagcaggtattttctttaaggatcttctctgaaataaggaagtactaagaacaaagtaccatgaaccttactgagaagacacattctcactacagtagcatgtacaatttaggaagaaggggactgaaacattccaaagtgtgcagagatggtgggccatcccaatgatggactgtgacaatcttacattccatatgatgactgacaacttcctgagaccttggctccaccatcagtgtttctaggaccccataaatagaccatatcaaagagctattatctacctgaatactctagtgccacttttctattttggcagggtctgccctcaagagaagctgtggttgttgagcatcacctgggcatcccctcacaatttgaatacacttcagttttttccattccacttaaaggagctaggagagtaagacatcagagtccccagcgacatggaggaaggaactgagaccgtctacgtgaaacaatacaacttcaaataaaaggtcttcccagtaagtaacccggttactcgtcctcagttaagggagtttcatgatgaatcactgaataaaagcaggaggaggtaggaagtaagaatataaattcaaacataaatctttaaaaaaatctccattatttgtattctaaaatcagaagaggaagatcacccatactaactggctaatctaaccctcaggaactacagcctttggggaaacagatttgggtatttacgagctgggtatgaattagaggatctcagttggctggtacggaaagattagcaatcactagccacacagtctcagctaatcccccatctgaggcacaggagctgttacagcctggtggggctatgtgggcaggaatccccaggaaatctgaaggatcacttcctgacagcttcgtgtgctgagtatcagcacctggcctgctttgatgatgggttttaccctaatcagaccacccagaaatgaaagggacaagggagccagctgagtttcagggagatgtccaagaagcaaccaggaggattagagaggaaaggcgttcttgttatctgtcaaatccccatacgtgctgacaaggacgggaggaaatgccgtttgaggctgtgtacttacacagtttacaggctgtaacttcatcttctaacctgtaggataaattacccaaaactaaagggacaaaatccaacttcaaactcagaagaccccaggaaggaaaaggcaggagggtgcattcattttgtctgcagactcgggctcatggggagaaatgactggacttccgaagtgcaaacacgcttgctaaaaaggcaaacacacttgagagttctaacgaccttcatcaggaaagggttcttccttcagtaagtattgtcatgcatttttcccccctcagctgagacaccagcccaaggtggatttaactgtggcacttttcataagcagtgtcaactcaggacacctcagtaagcacagctctcagcctctcaggtctaatcccaagacagctatggttttttcatgggtccaaaagcccagaatataacattctgaaatgatgatttatgttcaggaaaagagaagcagggtaggacctatttcttgatggacaggaacaggtccatctgaaaatgctgggactggaagcattttggattttggatttttttttgaatatttgcattatagaataccggttgagcatcccaaatccataaatttgaagtccaaaatgttccaatgagaagttcctttgagcgccacgtcagtgctcagaaagttgaattttggagcattctggattttggattttcagatttgggatgctcaacctggataagagccagtgatgtcctggtctgaaaggctgagagagaagggaaaaggtcactcacaaagacatttaggaggatatggaggagctatacatataaaggccatagaatttaaatgaattgaaggatttttttttcttttttaagacggagtctcgctctgttgcccaggctggagtggagtgagcgatgtcagctcactgcaacctacgcctcccaggttcaagcgattctcccgcctcagcctcctgagtagctgggactacaggcgcctgctaccacgcccagctaatttttgtatttttagtagagacggggttttaccatattgaccagggtggtctcgaactcctgaccttgtgatccgcccgcctcggcctcccaaagtgctgggattacaggcataagccaccgcgcccggccctgcatttgatttttaacagagaagatgtaaaaacagtaatagaataacagactttgcttaaggatggtatgtctagtgacaactggtcaaacatgagagtgttaagagagggtggttataattgggaagaatgtcctggaacattcagaatgcacaatccctggatttaaggaaaaggttataaaaaccaagtaaccagtcgttgatgtatttccagagtcacctattctttaatgttgccttgattcttttaatactggtaaattttcataggcatctcacaatcacaaagagatgaatgtggatcctggctccatcattcagagctccatgaccttgctcaggttagtggcttctcagagcctcagctttccatcagttaaaatacctactctttagatacttttcaagattagggtgcttaacccggtcctaacacacagtaactgctcaaaaaacagtaactaccattaactcagtgaacaattactgagcacctaccaatgaagaataacatcagccatgtcttcaaggaaaatttataggcaagacggacatgcgcacaaccaagttagactagctatggaaactgtgggcatgttatttgacccgtctgactgcaaacctatcatccatagaatgcatatagtaagagtgtgtacctgacatggttgtggtaaggatccactgagttaatacatgtcaggtgctcaaaatagtacatgacacacagtcgatgatgatgatgatgatgatgatgatatgatgtaatggttagctttatatgtcaacctagctaggtcacagtacccagacatttggtaaatactagtctagtcatttctgtgaaggcattttttagatgagattgacatcaaaatcagtaggctttgagtaaagcagattactctgtgtaatgtgggtgggcctcatccaattagttggaggctttaagagaaaaagactgaggccctcagggaagagggaattctgccatcagacagcctttggataagactgcaacatcaactcttccctgggtgtctagcctgctggccatccctgcagatttgtgacttgccagtccccacaattatgtgaaccaattctttaatatgagtcttagtgtctttctctggctctccatgtatataatatacacttgtcagagacagagagattctatggcctttatacatgcagcccctctgtatacacctatagaattacctttttcctctctcagcctttccaaccaggtcattactcgctcttatatggcttgagcattccaaatccgaaaatctgaaatgctccaaaatttgaaagtttttgagtaccaacatgacactcaaaggaagcactgttgctctctctctcttggtctgacatatcctattaatctaatacaaatgttattttgttattttattattttatggctaagaaagaaaggaagtgtgagaaatcaatatcacaaacaagatttctgcttgatcaactttttctgcgtggccctggaaggactatcctgtttcatctttgttccataaatccactggcagaatgccaagagaagttacttaatgcatacctggtcatttgctttttattagaaaataaatacaaatgtttaattaagataaacttgggtaacatttaaccttcctgatgacaccatggggcaaaggttttcacacttaactcagttaatcacataaacataactaagttctctgatgcaggagagaaaagggccctggtgagtctccctctttactctcttaaagaacacctaagctcctctcctacagaagagctcatttcagtttagattgacactgtatttaaggaacatttaaatatttgcaacaaattgaaatgaatcacccaagatgaaaaatccaacttccatactgcagctttagaaaggctatgatatactgaaatagaaactactagttgtcttactctgaactccatacaggaatgtatatggcgatttccaaaacgaagcttcctgaagcatctgatattctgactacttctgctggattagtggaacactttaaatgtaaaaaacgcaatctgtatttctctcattatctgtttatagcactaataagaaccactctgctctactgtcagttttccgctgggatagttttaaagttttaagagtacctaaaagctttatatttaagtcttgctctcaatgatgggtgtattgttctggtggggcctatatagctttagatgatagttagatgtgttatgctatagtcatttaaaagttaattttggggaaacaaaatttctcaataaatactaagatcttagacttttcagtaacttccactgccaaatgcgtatgtctaatgtggcaaatgccccatgctataatccgaagtcaggacacctgatgctccagggtttccagacatgtgtgtgtgagtgtgcacagggtctatgtatgctggtacacttaatctgctagatgggctttcttctgggattataaagtacttcacacaaattaagccatgagaataagacttctctgaaatggatagaatattccagttctccattttatcctcacagtgtcagaggcatttgaatcagagcaactccatcttgaataggagctgggtaaaatgaggctgaaacctactgggctgcattcccagattgttaggcattctaagtcacaggaagagacaggaggtcagcacaagatacaggtcacgaagaccttgctgctaaaacaggctgcagtaaagaagcagccaaatctcaccaaaaccaagatggtgacgagagtgacctctggtcgtcctcactgctgcactcccaccagcaccatgacagtttacaaatgccatggcaatgtcaggaagttaccctatatggtctaataaggggaggcatgaataatccacccttgtttagcatatcatcaagaaataaccaaaaaaatgggcaaccagcagccctcagggctgctctgtctatggagtagccattcttttatccctttactttcttaataaacttgctttagccttgcacttgtggactcaccctgaattctttcttgcatgagatccgagaaccctctcctggcatctggattgggacccctttcctgttaacaacagtgtcgaaaaccaaaaccagaactagaaccaggaggcaattccagctcgtgattttttttctgtttgtcatacccccacctgtctttgtttcgtggccacccgctcccggctcccacctgtctggtgcagcactctgggaccactggagaggaaatcagaaaaggctgacggaggctaaagacactgtggtagagcaggagcattcccaggcagcacaggctgtgcttctgaagccctgagcagggaacgtgagctcttgctgagagcacaccaggaaaaactaacccctgccaagaaggtgggtctgaccaagggcccgtctccaggccacagacggtgaccacaggggagtttctctggcaaacagtcagagagaaaaaaagaaaacaacgatctcagcaccactctgacctcataggacagcagggattctttagaggattgggcagctctcactgctactaaaggcttcacctgaaagaaaaattgaacagcctcgtgggcagtttaatgatgtaccacgctactgttatttactgcacttattagagcagcctagcacaccatagtaaatctactaaagttttacattaccttaagtatatatggtagcagagtctgacagctgcatatcacgatgatccattcttccattcttcatgactaacagcccctgaattttgttggataaggcaatgtaaccaacttaaaaactacatttcctaatttccactgtgactacacatgggactaaattctgttcaatgagatcaaagaagctctatctgggggcttcttacaaagcttcctaagtggggacttagctaaaacccctcttctgtccttcctccttcttcctccttcctatcaggaatagagacacgatggctggagccacagtatcttgtgacagtgaagcaattttgagaatagaagtcacacactaaggatgacatgataacgaaaatgaatgaatctggggtgctgatgacatcacggagcctctgctccacccctgcagtgcctacctctatacttcatggtatgtgaaagaaaacacaaatatcattttgttaaaaccattgattttcaggtcattcacagacaactgcaattcctaactgaatgagtgtacactgaacacacagatacaacatatatataagtgtaagcagcctgctgagatcaaccaatcaatcattgaaagattatctcccaggcagccgcagtcatccctttctctagtgaatcgttcagcacttactgagtgcctacttatcagccaagtgttgaagatacgaagatggatgagacacagctcacgccctcaagcaaatgacgatctgctggaggacacactcaggaagtagtggtaactgctgtatgaacagtaagatgcatgcagtgcatccatttaacagatgtctgttacacacctactaagtggtaggcagtctccaagggctacgttcacaagtctatattctagatggcatggggcagagcaagttagagggtggacaagaaaaataataaagaagaaaatgaaggaacaagacaacttcagaaaataaggatgatgtgctagtgagtgactgctgggagctattttagacatggtgaccagaaaaggcctcaatgtaaagggtatatttaaactaagattatgaattaagtggggggaggggcggggggggggtcgcggcacagggaatggcctgtgaagggcttggggaagaacatttttggcagaaggaagagcaagtagaaaggtcctgaggcaggaataggtcagatagaatgttagagggtggtgctcatggctcagagaggagctttgattgtggggaaatggagaagtcaaggaaagtttcccaagttgcccttgactacaaccaagtcttcctcctctctagagccaggggattcccatcagagaaggagcacagctgcctgaaccccaccctctccacccacctggcctcacagctggctcagtgacacctttatctgtgccttaatcccaatatattttccttccctgaagagcaatatggatgccgtctccctccaagtataagacttgggctgaggggaaagcagaaacccctccttttccttctgcgttagagaaaaccatttttcagcagcactaccacttcaaaagcagctgtcctgaataagacccaggctgctttcagatcaatggccatacgaaagctcactaaaacaccattcctgttcgaggtttgcccagtaccacagttcaaaaggatcaaccccattgtcatgggtcatagtccacaccagtgtagaagagcaacagcccccaggatctacagctgcagagagcaccaggcaggataaactgatgcaacctgcccccttactccaaaatcctaagctggtcccatgcgagggtccatgaacaggcatgaccatgctggacagtgtctgcagtcctaggtaccctcaaatagcttcatcacaaataccaaaaagatgatgacatccctaatcttttgatttagttactattatttacccatcaggaaatgcactaggaatgcactagtcacagaatcaactttagaagacttcaggggtgatacatctgattttcaatgaatggtggtgttattacatggacagtgattctttgatcagtaaaagaaaatgtgacactgccttctttccaaaccctacctcttttcctctgaaaactatgactttatcaagtgactgagtttttccctattttaacaaagactttctatcctttcatagattcactgcactgaataaattgtctgtttattacctgttgatctacttctagtgaattctgcttgttaaaaaagtggaatcgtaatttctcactggttttctattaagcctccactcaatgttcttggtctcctctctaacaatggagctgatgagtttagtggagtctcccggtaatttccctcttgtattgcatgtttctctcagatgaatatttcagttaaaactgagactagttgataattttttccactgaagtctgtattccaatttttttttttttgatacagggttttgcccaggctggatcacagtagcaccaccacggctcacagcctcgacctcctgggctcaagtaatcctcctacctcagtctcccaagtagctgggactataggcatgcaccaccatgcctaggtagtgatttcatatttttgtagagaaagggtctccctaaattaccaaggctggtcttgaacccctgggctcaagccatcctcccgcctccgcttcccaaagtgctgggattacaggcatgaagcactgcacccggctctactcctatttttgtctggttgttcatctggatctgaccaagtacggcctatctgcctcacccacttctgtcttccataagctctgtttaatgtcagataacatgtattgactttttgttctatctgccaaaattgggattggagttgagtatattgggttgaagttgattatattctttccatgttgtcacactgtgggtgtttttcactgtaaaattagagctatttaaatacattatctgctcacctacaaaagctctcacttcttcagaaacacagaggttggtcaatgcttcccattccactgaattcacacaccctgctgggaatccagtgatgaatggagaatggggagggtcagcctcaccttccatgcaggtcaatatgtttatttttaaagaagagtcaacctgctctactactttttgtttttttaattccttagtactcacacactatgaaccatgcacgcacatgctacgaaccatgcttggggaaggtacaagaaggataagacaaggcattgggtgacagagctgccacggggctcgcctctagccagagtgatatatagtaaagggtccacaggacctatgtccagaaagagttttctttttccagcaaaacataataaacaaaatctaaaatatatattgtcttacacttgagagaaaatatatgaaccataagaagctaattattggattttttaaaaaacagacttagagaaaatgcagtcataaggacttcacgtgagtctttgagtagaattcaaccatttaagtactccccactcattggacacctatgcacgtaggcactgttagtgctggagtaacaaaggcatgacctgcatcctgctcttggggagacctggcccttagacatgagcacatgtatagaggtaactcatgcaggatgataaggctggtggagagatgcaaaccgagcacacaggaaccggcaatcaatcaaacagcctttagctggttgtgggaagaccacgttagcaaacagatgctgaagtcttctttacacacagaattagcaaaactagtagcaaaacagatctttgaccaggtaaagccagtagcctaacgggactctgaagtaagtttttacactttccttgaagactcatggcaaatatgaacctcctatttctgctgatggggtgaagagctgaggtcaaagagcctccctgggtctcccagttctcatcacactttctcacctatgagggcagactgcccacccaggcatcccaggggctcccaccctgggagtcatcaggtttggccccttttcttcttttcatgaagacaatgaacaggaaggagttagtaacagttcctgctttctacttgctcaatttttacctcctgctatctagcaggggaaaatgagaaactctccatcggcctcaccctcactggagaaattgtatgtgatccaggttatgtaaacaactcttccttcaaacagcttcttgtggactttataacctcgtctaccagtattgttatagatggctcagctctaaactctgagatggataattgatatagaagccatactccctgaaagtaagccatgcttatggaagatgcttggggtttaaaaacaaaggctgtcaacaaaagccctcccagccactcggcacctatcagaaaacctgtgaaggatgtgacagagagatccagcacacccagcagaagtctggatgatgctctaaatatagctgttgaatgattagtatcaatgactacgtatgtgcaaagccagttaactaaattttgacaaatagaaattccttggttaactatttcaatgattttctaaacatttcataggaaatgaaattcaagaaacatgtatctttcatgcagtcctcccctgggttctaccagacacaacccttaccccaaagaggcagattataaagagaccacataggcagtaacagagtggtaaaaagatggggatgggacagggtgtggtggctcatgcctgtaatcccagcactttgggaggctgaggcaggcgggtcatttgaggtcaggagtttgaaaccagcttggccaacatggcgtaaaccccatctctactaaaaatacaaaaacataagctgggcatgggtggacgcctgtaatctcagctacttgggaggctgaggcaggagaattgcttgaacctgggaggtgggggttgcagtgagccgcaatcacaccactgcactccagcctggttgacagagtgagacgccatcttaaaaaaaaaaaaaaaaaaaaaaaaaaaaaaaaaagatggggatggaacacaaggaagctctgacttctgccggagggttcaggataccccactgtctgcagaatttccccatacccccaaactcagacatggagcttccctagcagactgacagttaccaaaatataggaaagaaaattaacttggggtaccctaatttgaaatcaataataaataggaattaggccaaagtttacgttttttactacacatataaaatggtctgttggaggaaacaacagtaccaagagttgttgtgtaggataagtcatacttaacctacttaggagactggagtatctcagacatctctgcatccgcaattatatacaaataactaacaaactaattacaaaccattaaggcagtgactatgtctttcatttgtgtgtcactcaaagggccttgccccccattctagacaaaatgatctttgttaaaatgtgtcacttatgggcttctacttggcaacatgttggtcatctcctgcaagcagatatattatttgattcggtcgttcattaggtaaatatttattcaatatttattatgtccaaagctctgtattaagtgctataactgaatataaaggcgcataacacatctaaacaaatatacgggatataaagtcagaaagtgaacatccagccgggtgcagtggctcatgcctgtaatcctagcactttgggaggctgtggtgggcagatcacttgaggtcaggagttcgagaccagtctggccaatatgataaaaccccgtctctactaaaaatacaaaaaaattagccaagtgtggtcacagacacctgtaatcccagctactccagaggctcaggcaggagaatcacttgaacctgggaggcagaggttgcagcgacccaaggtcgtgccattgcactccagcctgggagacagagtgagaccccctccaaagatagaaagacaggaaagacaggaaagacagatagacagacagaaaaagaaaaagaaagaaagaaaaagagagagagagaaagaaagaaagaaaaagagagaaagaaagagagagaaagagaaagaaagaaaagaaaagaaagaaagaaagaaagaaagatagatagatagatagatagatagatagatagatagatagatagatagatagacagacagacagacagatagatcgatccaaacacaggcacactgagtgaatacattacaggaagtggaggtggcatctgaccagggagatcagacggaggcattcaggactggcttggggaatgcacatgattctggtgtgtggagataagagggttggacaccagctcaagagagatggaaagcatggcacgggggccatgggcaacactgagacatttctttttctcagcgctggaataaatgaagggctggggttgaagggatgaatcagaagaaaacatggactcagcacagagcatcctgcagccgagatcaggcatctagatttggcagtccagagtgagtgcttaaaagcactgaatgcttttaagccaagaaggttgtgacaattgtatttaaaagcaataaaaccaagttgcttctccagtcctccataacttaggggagcctccttcaggctggctgactcctttctcccacgcgggtctgcgctgatgagaggctgctgtacaggtcaccatctagggtgggactcggagctctctggtctgtggctgaggttcactgcatgtcatgactgcctgtgtccaccttttttcccaagatggcctgactgctccccatctgcagtgctcagttcctgcaaaactcacccctttatgaagctccaagttttgaagactcctacccttaacacatcctgcaacaactgctcatagtgcctcgggttccatctccctgccccattacacgttttaatatctgcagcacagtctgagggccctggttggctttatatgcaaatagcatgaataattttctttgatgttttattctattgtgtttcatttggaacagagaaactcaaaggaggaaggatgatgaatgagaaaagagggcagcaagcgcctccatgtaaggtgctctaacttaaatcagctttttgcagattctctgctatccccaaatcatcctccttgcctaattctcaaaaagaacaaaacttctccagacagagcccgcaaggccagagcaggacaagcagtgtgtgcatcccccgctcatcccaaatcagcagtccatgtagaattaaaaccagtctcaaaacacaagaataaaacaaaaaaaaatcagactaaaaacccccaactgtcttctgtatcatgagctcacaacaagatccaatcttcccaattacagcaatatgaatactgggaaagaaatgcgtgaaaacctccaaagtatcctcaatttacctcctccaaagtaaatttcatttgggaaaaataaaggtaaatacataacagagggccttgtttaagttgacaataatatttggcatagtgtttatttcagctaggaggttatgccagggcacaaggggtaaatccatggatttgggggtcagaacacctcgagatttaaatcctagctctgccactttcaagggtgaccttaagcaagtaacttaggctttggattcctcatctgtaaaatggaaaaataatattaccaacccaatggggctgtcaagaattaagtgaaatacctgcatataaaagtacttaacacatccatttaggatattttattgcttctagcattcatatatctaaactgttttaactatttctatctccttaagtaaaatatttgtttctttttagttcacctaatgcagcagtccccaatctttttggcagtatagaccaattttgtggaagacaatttttccataaactggagagcaggggggaggatggtttggggatgattcaagtgcattacatttattatgtaccttatttctattattattacattataatatataatgaaataattatacaactcaccataatgtagaatcagtgggaacccagagcttgttttcctgcaactagatggtcccatctggggttgatgggagacagtggcagatcatcaggcattagattcccataaggagaaatctagatccctcgcatgtgcagttcacaataggattcatgcttctataagaatctaatactgctgctaatgtgagctcaggcagtaatgccagcaatggggagcttcacacagatgaagctttgctcacttgccagctactcaccttctgctgtgcggcccagttactaacaggccactgaccagtagcggtccgtggcccaggggttggggactcttgctctaaaggcagaagaaaagataaactttagggaaatatgtggattccatttggtatatgaatgttctaaatactcataactcttataaatatttcaaatatcaaataatggaataaaatgtcttttcacatcatcacacaataaccatgaaatgatatccaggtactgaaatcactctactcttctattttccctagccacaacaaaggaattctaaaacatccaatctctgacactagctatttgatttacaggaggcaggcaacaacacactactaacaaagtgactttagctaaatcttacgtacatgtgccactgcatcaactcagtttggacaaataattatataattaattgtgcagaagcattaaatgtaacataatagtaagcttaaatggattgtttctatactcttttccttagccaagtatttctggctgtgtggttgggattctggtttttgtttcattttactttaacctgtcaaaaaataagggaaaaataagttaaagaagagtaagtatgtgggtgaatatgtggtagaggttctaggagaggaagaataaaaatacatgggttgaatctgaacattctctggtgaaaggcatataaagtcactgtattctgtataccagagcctgggtcatgtttgtttcctgcatgaatgatcacaataattcattgctactactaataatgaagatcatatgactgaatgaaaatttagagggatttttcttctctttcactaaattgtcatatccatgaaatcattttatcttacaacctcaaaataaggacagatttaaccattccaaattcatagattgaaaatttatgcatccatttagcaaatatttcataaaaacctactatacataattacaatcagactcatatcaatatgtgaattttaaactgtgtattatttatgtttcttgccttactgtgacaaactcttgagaagctgaaaacgtacttcctatgacaaataaaatccaatttgtagacagaaaactgaagttgaaaaaaattaagataatgagactacatatgtctacatccaaacacacgtgcctgtgtgcacacacatacacatatgtccctttatcaaatttggtgtccacaaggggctgcataatatgaatccactgaaaatagaggtcatagttctatactcaatagtgaaataagcctttatctagtctaaagactaagaaaaatttattctatagcttaacatttttaaacattctaattgaaactataccttcacccttaagcaaagaatgaatcaagtcataattatttatcaaaataatttttctgataaaaattatgtggtttcccttgaaaatatctttctgattttgtattcataaagaggatcatttttgcaaaaataacttacggtttctgcaattcttgcaagagcttctctttttttaagattcctcctatgccatcatccactcgattttctctttaattactaacttgcctaaccctgccaaatgctcatttgccagtggctctgcctgcaatgcaagcaggtctccaacatcactttcactgacatcatgaaatcccgtatttttgtaagatttacactcatatttccaaattgtattgtacctgcagttccttgaaagatgtttacaacaatcttattagtgaaggacaagtagaatggatgggtacaagagatgacaggttaggaaagagggatgtttgagaaggaaccagttttacaaatggtcagtttattagtaaatactgtcatattacaatacctttttatttatttattttgagatggagtttcactcttgtcccccaggctggagtgcaatggcgcaatctcggctcactgcaacctccgcctcccaggttcaagccattctcctgcctcagcctcccgagtagctgggattacaggtgtgtgccaccaggcctggctaattttcatatttttagtagagacagggttttgccatgttggccaggctggcctcaaactcctgacctcaggtgatccgcctgccttggcctcccattacaataacttttgattgtctttgcaaccctggaactgactgaaatctctgagaataacagcttggaggacataaaaagaagcgctaagctgccttgcttagagagcaagaggtacaggtttggttactctccctttatttcagaaaggcctttgttttctagtatggtttggatctgtgtctccaaccaagtctcacgtcgaattataattcccaatgttggaggtggggcctgatgggaggtgactggatcatgggggcggatttgccctttgctgctgttcttgtgacagtgagtgggttattgcaagatctagttatctaaaagcatgtagcacctcctccaaaccccttcctcctgctctgaccatgtaagacatgtcagcttcccctttgccttccaccatgatggtaagtttcttgaggcctccccagaagccattatgcttcctgtacagcctgtagaactgtaagccaattaaacctcttttctttacacattacccagtctcaggcatttctttacagcaatgcgaaaatggactaatccacttttcaagctcctaaaccctcttgcagacccctctgtcccgctgcccccatcatgaaagcgccctgccttggctgacctcccatgactcgcttttcttccttccatgactgccagtcctgtgtgttattatttctaggctttattagaaagatgaatacatcaaaatagaaataacttatataaaaattatattaaaaactcatcttaacgatactatttatgatgaaaagggtgagcctgcagaagccctctcacatgtctcatgtgtcatgttttcctttacaagggtccttctgctccttaatcaaaggactgactcactcaggcagggcacctgcaccctcctggtcaggaatgtgagtgtggagggcaggcagcttgggtgcaaatcctgcctctcgaacttactatgtgaccacaggtgagttgttgaatcatcctgtgtttcagtttccttacctgtaaaatggaggtaattacagtgctgtacttactccgctgagtaagaggatttaagtgataagataatacatggaaagtgctccatggtgcctgaggtccagtaagcaccaagtgctagtctttaccgggaacatcaaacaccaactggtgctcagcaaacacgaagccccacactaaggcctgggaatacagagatcgtatacatgcctcaggcctgaaaagggttctaagattttagaattccaaaggtatcctcacattcacaagctgtgcaatttggggatgggggactgggacggacattcagtgccacctgtgtctcctggcacctctacaactctagattgggcatctctaatgtctttagactttcctccactggaaaaaaaatggagacaatacaccttaatccacaagttctttggaatgagtatggcatacaagacacatttgagaaagcgtctaggacagactcaccccaacactcacaaatgtgcatttcccttcctttgtttttaaaagaagaccataaacgtaacttgaaaatacctagaagaagatgtgccatttaaatgaaagtgatctgtgattaattttaaatccttctatgtccaaactacaagtcttagaagattgtggatcggtaatagctataacttctcaaattcctcaaaatttattttttcatcctgtactgaagtggcttaccaatgaactaagaaagttatattgtaatacccattctggggctctgttttatatagaagatgagaaaaataacagtttctaaaaataggtaagaaaattacgtgaaaatgagaggtgaagtgaggaatggcaagaactgtagaaccaaatcagtgggctggacacatgagggacggtgagggatggtgtgggaagaacccaagtgggaagctgggcttccactgccttgacctccacatcgccaggcttctctggcatgttcctttgatcaatggtccaaagagggagagactcagctctcacccatgcacctgagtgagtgactggggagacacagcaaatgctgagtaagcacagagagcctgtatctggtaggtttgattgctggacaaggccatggcctaagttgccttgtatacttattccagggactttttgtctatgtgtgaatggagtgatatggatcctttaccactactggaaacaaataagaaacctcaaagaataagtactaccaacagagggtcagtgatgtgtttttgtatacctttagcattatctaaatgcagggacataaaaatgcatggtacaaaaaaaaaacccacttaattaacaatttgccattctgataattatacatagaaggcattgtttgggtttttctatctttggtcacatcttagggctattctgatttaaaagtatagagtataaaagtcagtgtggcaatttctcagggatctagaactagaaataccatttgacccagccatcccattactgggtatatacccaaaggactacaaatcatgctgctataaagacacatgcacacatatgtttactgcggcactattcacaatagcaaagacttggaaacaacccaaatgtccaacaatgatagactggattaagaaaatgtggcacatatacaccatggaatactatgcagccataaaaaatgatgagttcatgtcctttgtaggggcatggatgaaattggaaatcatcattctcagtaaactatcgcaagaacaaaaaaccaaacaccgcatattctcactcataggtgggaactgaacaatgagaacacatggacacaggaaggggaacatcacactctggggactgttgtggggtggggggaggggggagggatagctttaggagatatacctaaagctaaatgacgagttaatgggtgcagcacaccagcatggcacatgtatacatatataactaacctgcgcattgtgcacatgtaccctaaaacttgaagtataataataataaaataaaataaagaaaaaaaaagaaaatattgctggactttggaaactacaaaaaaaataaataaataaagagtggagaataagaaagctggaaaaaaaagtatagagaggatagatttcatatatttttgcaataaatggcaacttccacataacacaaatcctgaaactttgtggaaatgttaacaaggtaattgtataacatacaaaacactgtagggaagtatagtgtttagaaatgcttcaattatcaccaaggtgatgtagttaaataaggataataaaatataattaaacattcattacagaaactatcaaaaataattgacctgtacaaagcacagcactcctattaaaaggaaactgatggataataaaatatatagagtattctgtcctctagacataattattccaaggcagcaattaaatttatagaaaactgttaagtttcttctgtgacgctttactactgtgaactcaagatgttttgagtgagaattgcctccaaaaaattcttatgattgtttaacatcttaacaagaagtactgccataaatttaaatatgtgtgttatatacaaaaaaaagatgaattttaagatgcttaggactctgctatatttgtcatatttctggtgtccacaggattgacttttgctccagttgaaaatgtctaattcttctatagccaaatctgagcacagtctaatattgaagaaaaatttaatgttaatgcaaaaataacattctgcagaaagagtgacagaatatatttttatgaataattatcaggccaaattttttatacaagtttgtttcttcatcatttaaggaagcgggacactgttccatgaaatcattccagtgtcttatgggaagcataatgtctttaaaagggtacaaaaatctctccttttggcctttttctagcatattcagagagtattgagaattctctacatagaggcagttgtaaacataaacttctttacactgctgctgggggtgagaggagaatagaatatatttttatactgacaaatgttttaaccactggaaaatgaacatgactttagtaggtaaaattatcatgtacaggcatcagaaaggaaaaataaaagcagaaaaactgagaactgtgtgtggagaacagccttcaaaaatccaattgtatttcatcttcctcctcatttagtctttttttttttttggctgcaaagatgctttaaaaatatattgttttagtccaaagatacccctggcacaagcgacaataatattacagggacattaaattaaggaaagaaccaactgatatgtgtctatgagagaagagctacagggtgaggaactgggaacaaaggaggaagacactattagcaagcactggggccctcctttattgacgtgggggaaaagtctgagtcccagaatgaatatttcctgaagcagagctgaaatggaactgtgacggacatgtaatgtaaaccctgatatcaaaagccactgaagttggaggggggggctgtttgttaccgaagcataacttaagcataagctgactgacacaaagcctaacatccagtttttacaagcaagttatggtttaaggacctgattttaaatgactaaaaatgttatccctcacctgcaaagccttgtttttacattaaaataaatttaaatgatttggcaacattccttaaatatgccagattttgacaactcaaaattataccactaaagaaattccagagacatgtgtgttcatcatccatctctattcatgacagaacatttcagcaataactgagcaagaggcaattttttatacctggagtgcagcactaggtaattctggcaaggagtttctgagagaggaacagaaaatggaataaggaagtcattgatactatatggaaattcaccactgttgctgccgtgactgaagaggcaacgtgagttctatgccataagaatcataatgtaaaataggttaagcataaaacaaaataatataagcacctacccacaaaaattaaaatttatggaagattcggcagaaacagctgagagtggtgcttaataaatcccaggccttgtgctaaagccttgggttatgaagataacatacattctgttgcctgtgaaatctgaaaggggtctgtaactgcatgaactgcaaagacaccctcacattcacaggctgtgtgtggacatacgtgtgtgtgtgtgtgtgcatgtacgtgtgtgtgtgcgtgtgtgtgtgtgcgcgcgcgcgcatttttaggtagagaccaattagataccttattcaattcaacatagacccctgaaaatctgggaggtcattcccctgttattgttaaacaatttatcactcttactggaaaggaagtaatgcttaacaccttagggttgcatgcagaaatcaattaaaatctaaagacaataatccagcatgatatttcacttaaatgaacctccacagcctgtcaaattagaaaattcatttatgtatgtgtgtgtgctgtggaagggggagaaaacagaacacagagggagtcattgtatttctttacagaatcaaaatgacacggtgcagtcacaaagacaccggccctttggtgttggcctacagagcactcacgaggcagcacagtctccaaagatggcatgaagttttaaaaggaccaactggcccatccaggttagaaagatctttcactagtgctgtctgtgacagacaataaaccactgtcaggctgcgaaggtctgtagaagacagaagtctgcacattaagtcttttttagaggggagttcactgaatgtgtggaaacaaaggcttggtcttgttctgcctatggaaccctcagcatctgaggcagaggagcagggggtctctggatggcaggccaggacttctaaagcaggcagcaggcctggcccagtcacactcagtcactggggctgaggtcagtgtgacacgctttttagatgcttgaagaattcttggtagacctcactttgccacagtaattaaaacgggatggttttcaaactcctgggcagttttacccctagaatgaggaaactggtcattgtgatgcatcctgccccaataagaacactgttttaagttttagacacacctacaagagggacacgatccaaacaagaccgaacagacagacaggcttcagaaatgttgatgggaaaccatagatgcaaagcctggaaaaattgatggaactgagtagttacctcaaaaactgggggatacaggcagggcaacagtggctcacgcctgtaattccagcactttgggaagctgaagtgggcagatcacttaaggtcgggagttcgagactagcctggccaacatgatgaaaccccatctctactaaaaatacaaaaattagctgggcatggtggcacacacctgtaatttcagctactcgagaggctgaggcaggagaatcacttgaacctaggaggtgaaggagccgagatcgtgtcactgcactccagcctgggtgacagagcaagactctgtctcgaaaaaaaaaaaaaaagggaggacacaatgcgacacaattcaataaatatttactgagcaacttccaggtggacgatcctatgctaagcaccgtgatgggaaatgtagataacgataagaaacagcttctgtccttagggagtctgcaatctaaatgggggacaggggaaggggaggttgaaaataagcaagtcacaaacacaaaacaggcctgaggaaacacacagtattatgacctatgggtggaaaagaccacgtttcactagaggacctttctgagaaacagataggattttgggagccagaggatttttgaggggagggtaaggaataagaacattatcaaggccgggtgcggtggttcatacctgtaatctcagcactttgggaggttgaggcaggaggatcatttgggcccaggagttcgagatcagcctgggcaacataggggggcccatctctataaaaaatacaaaaattagccaggcgtgggtcacagctacttgggaggctaaggtgggaggatcgattgagtccaggagtatgaggctgcagtgagctgtgattgcaccactgcactccagtctcggcgacagagcgagaccctgcctctgataaataaataaaggagaggacagcaagagtagatgctgagcaggcaaagaccaaatgctcttagggaagaaaaaggaggtagcaatttaatcagcttcctttctgtcaaaaggctaagccctaagtagtttgaatcctaataaaatattgcttttgttgttgtttgtattagagacagggtgttgagcaccaccatccatgcccagctaattttcgtattttttgtagcaagagtctgccaaaaaaaaaaaaaaaaaaaaaagaacattatcaagaataggacaaagagtcagaaaacaaaatgtatgcggctggaaaaatatcaaaaatagtctagttttggctggaaaatagggcttgacaagaaaaggaagattagcacatctaacacatatttccaaggcatatttatacttaaaaatttttatcacattaatataatgttctcatcacagttaggaaaatgaagcataaaaaaaatcttcctcacaatccctctgttacacgtaatccttttagtccagcacattgcaagcgctcacagattgccgagttgaatggaaacatgaacttacattttaaaaaatagtgtatagcatatatatatatatatatatatatatgcgattattggcatttttcctccaaaaatcagtcatgtgtttctcccctttctatctgcttgtaaacacagcccgctcttgctaaatccatgttcacaatatgttccccattttaaccccgtgttagcttcctctctacacccagcatagcctatggcttccccctgcatcaaccaatcacatctgcacccaagcaaaggaccacagatattttaacagtaacctaaagagaataaccaaggacagggatttgtatgtgtgttgcttactgttacatttccagtgtctaaaacagtaactggcacagagtgtgttgatcaataaatattttgttgttgaataaggtaaacagatttgtaaacttacacagaataagccaaaatacaattatgtattttatttgcttacctgctacttaagattattcatggtattaatagagtagcacaatcaagattttacaataaacgaaatgtgaaaatgtatcttttaaaaatccttctttgatgggcactagtgttaacatctgagtaattactcccccagaactcatctttaaatgtttaattgtgtttaaataataataatacgggttagcctctactgtgatttttagactcaatctgaactttctggtcataaataacgtcacacattcttaactgttaaaaaaaaaaagtaccgtagtcattctgatacttcatttaatattactatttacaattattttctatgtttactgagaaaatgactagcaccatatggactaactcagaggtatcctgctgagatgctatgctttatcaacaatatgctaaatgctgctctccttatgacaacccccaaacactttctcttctaacaagtgctttgcttcacattacaacctttcgttaagaagtcaagcttgctctctccgtcctctgctctttcttctttgcctccctctcctgtcctatcctttgtgcttgcttacatactagctaggacaggggtcctccaaattcagcctggggcttgctgcatttggggaagagacatttgcaggttccaaaatggcctggatgtcagcagcagtgcacatggaagaggaaggcgttccaggactcctagagcactgtgatatgctaatcaggacccagcctccacacttgccaacccccatgatgtgcggctccttctgagctgccctgatgtagctgccaaacctgtgacctactttcacacagccttgtgctcctggctccccacaggcaatgcccttccacagggtggacttgctatctgttttctcaaaactggaactcacattgagccagccagataccctttcagcctttcagtcctactgcctgtggagcttcagtcatcatgtgtcagcattttaaaagccactcattgtcacagagttcttcccatcgctcttctcccactaacatctccccaccttgcctcccactcccccagcatatggtgaagcagggccaagacaacttgggaaaggtgtcttgttttaagatgctaatctccagctttctgttccgttctaccagctagaggcctctttcatgtgaagatcatatactttgggcatcacaactgctgaaaaactgtggttattaattgctcaagtcaggctggaagatgtattgatctttcctccctcgggggccccggtgtttcttgcccatatcactcacttggcaattaatcacattttgccttgagacatctgcggtttcacttttgccattttccttagctctttgttcccaactggctggtccacttgatgcacacaggttttagagattatctgtctctgagttttccacagtcctacacagtcctacacaaactgggtctcaaaagtattttggactgacttcttgtctggaaaatttcttcctgctcctccctgctaagcacaatgataaaccctgaaaataccacaaggggcagccaaaggttccatgtgaaaggtgaaaagagtaaggtaaactagtcagagacgctgccctgccaatagaagaaggcaacccggacctggcatttcccaacccacagcctatatacagcaacagaaggcagtcccggtaagtgcattccttctgcaaattgaaagagtctcaccaacaaaaccaggaggggtggaatccgcaaggcggatagatcaatcaccccactgaaaaaacttggccagatgaagcactctcctacctctctaggcctcagattctccttcccaactcagaccaccatgcaagggggatcacccagcccaggaagggttctccttccctaccaggcctcagaaacatgaggcagctgggcacaccagaaaagggaatcccaccatgaaaagtacccagcccaggaagcactctttatccatttccttcttataggctacatactccactgctccacataatgcagtagggaacctggcctgacaaaaactccttcctcctcctcaagcagctgcaccagcagcgcaagataaaccaagcagaccaaagtagcactacaaaggctctgaatgttaagtcatccctacaactacagtccacaaaagtagcctgtgtgctaaatgttaaaatggagactcaaaataatagccagaatgtcaggagatgataaaaaatcacccatcataccaagaaccaggaaaatcacaacctgaatgggaaaatacaattagatgatgccaatgctgagatgatcagtgttaaaatgatgacacaagacttttaaagctgtcatcaaaaaaatacttcaacaatgaactataaactatcttgaaacaaataaaaccaaaatctcagctgaaagagaagttagaaaaatgaacaatattgaaactgtataattaaaaaatactataacagaaataaaaactgactagatgggctcaatagtaaagtggagatgacagaggacagaatcagtgaacctgaagacatatcaacagaatttactcaatctaaacagtagagaaaaaatacatctcatttgtcttttccgttttttttaaatattagcaacatccacactgatatttaacttcttttttaatcattagagtaccaaaagggaagaggaaagtatggatgaaagagtattcaaataataataataataataataataataataataataataatggctgaaaatttcttaaatttggtgaaagaaataaactcacagattgacgaaatccaaataggataaacaaacccaagcaaatccacaacaacacacatcataattcaacttctaagacctcaagacgaagaaaaaaccttaaaagcagccaaagagaaaaggtgcattacctctaggggagtaacaattcatatgatagtagatttcttgtccaaaaccatggtggccagaaaaaatgtccctgacatttgtcaaatactgaaagaaaagaactatcaactgaattctatatttggtaacaatattcctaaaaaatgaaagggtaaataaagacattcctaaatgaaagaaaagagcatttgtactagcaaatctacccttaataaatggctaaagaaagttctctaaacagaaaagatacacagaaccaagtttgaaacttcaggaaagtaaaagaacatcagaatggctaaaattgatggttgaagcaaaaattattgcagcatctgatgtggtacacaatgtatatacagggaatacttaagacaattacatttaaagagaggaaaggataaagatacccaaatggcagtcaggtttctacattctacacgaggtttaacactcattcaaagtggtaaaacactgatagtggctgtgatatgttttttatgtgtattatcatacctagagataccactaagaaaagtatacaaatagatgtactaaaaaacaaaaaaaaaccccaaaaacaaaaatcactgaaaacaaatcaacacagaaccattttttaaatgttcaaataacccacagacaattaagaaaatagaaacagaagaatgaggagtcagaaaaacaataaaagacttagcccaaacatatcaataattaccttaaaagtaaatagtcttaacaaccaaataaaagacagagattgtcagagtggataaaataacatgatccaataatatgctgtctattagaaactgatttcacatacaacttcatatgtagattgaaaataaaaggatagaaaaagatataccatacaaacaaataaaaaaaggcagaaatggctatattaatatcagataaagtaaacttaagagcaaagtaaaatactaaagacaaagaagaatgtgacatgatcataaaacaatcaattgactaggaaggtgtaacaatcctaaaagtatatgcaccaaacaacagggcctcaaaaattgatacagctgaaatgagaaacagataaatccataattatagcaggggacttaaataccctactttcagtaatagtcagaactactagacagaaaatcagcaaggatatagaagaaatgtacatcacaatcaaccaagatataattgacatatattttaaaactctactcaacagcagaatacacatttttcaagtgttcatggaacgaatgttcatcatgatagagcatattctgtgctacagaacaaaattctacaaatttgaaagaactaaaatcacacagagcatgttctctagatcataacaaaatcaaactagaaatcaataacacaaagacaacagaacaatctccagatacttgaaaattaaacattcatttctaaatactgaatggttcaaagatgacatctcaaaagttatatttaaaaatccatagaatgtaataaatataaaaatacaacacatcaaaatatgtagcatgcagctaaagtaatgctgagcggggaatttacagtactaaatgcctacattagaatgaggaacttctaaagtattacatgcaaaaattctccataaaatattagcaaattaaatctagcaatgtacaaaaagaattatgcaccatgatttatttaggatttattcctaggacacaagggcaacataagggatctttgtggtcatgaaactcttctgtatcctgactgtgttaatgtcaatatgctcatgattgtgttgtaagatattagcactggaggaaaatgggtgaagggtacacaatctccttgtgttttttcttacaactgcatgtgactctacaatgatctcaacaattaaagcacctgtggatgctgactataattcaactcagccatcaatgtttaagcaatgttatgttatagaagactgacagtgtcgtggttgttgatactcaggggtaagactctccaaaactaggatttgagattgttgtctgagatttcaactttataaaccacgcgaaatgaacagaagatgaaatacacaaattttcaaaaaaaatcactatgatcactatgattgttagacatataagactagattataagctgacagaacccacctattcaaagaaaggacatgtggctcagaaggatggttgaagaaaccatgctaacaaagaaacaaagaaagtgcacagcatccatcccaactacttccaggggaaaagaagccttagtcaaatctattactaataccctgttggtaaggcatctgcaccatggaggaagaaacacaaaattgtattcattggacttcaattattccagtcctgctctctttcctggagtgcacagtagataaatgaaaatatttagaaatccacattaaacttgcatcggaaaactgagaacaatagctgaaatttatggttgtacacaggtctgcctttgcttttttcctctaagcccgccaagatcacaatcctatattctttccaaagccttttagtccttttcctgtttaaatgaataaattgacattctggtttcacatgtttgtcgtattagtttagtttatgtgaatccactctcaagagtttggtggcaaaactagccttctgagcccaaggcccagcctatgggctgtgagaaattcaccactgaaatggcaccaaccacaggtgacccgttagaagtggggcgagctctcaagatgacggacattctttctgttttgtggtccagtgtgatctttcaaacctactagtcatatttctgccaaaactagctaattagacatggtgctttgttctttgactatatatattaacacaaatgcctcatgatgagtagaaatatactatacatgagatttttattttgactagcaaaaaattttgcatttttgtttactttaaagcactacgaaaaatccaagatattaaaattattacaatagacaatgaaattattttcttccaataccagattttgatatagacttttattaataaatttatattgagttttccaaaccacatccatctttctctgtcaggactcccacctagtttcctaatgcccagtgctcaagtagcctgtcaggtaaaaagcaactaaattagatggacttaataggtttgtacttaaagataaagtaaaacttacatggctgtaatggccaaagattacaatttacacagatgaaatactgcctaaagggtcatttgttattcatggacaaaaaataataataataacctagggaaactaaacccagaaaagatggttttaaaagaaaatgaagaggccgggcgcggtggctcacgcctgtaatcccaacactttgggaggccgaggcgggcggatcacgaggtcaggagatcgagaccatcccggctaaaacggtgaaaccccgtctctactaaaaatacaaaaaattagccgggcgtagtggcgggcgcctgtagtcccagctacttgggaggctgaggcaggagaatggcgtgaacccgggaggcggagcttgcagtgagccgagatcccgccactgcactccagcctgggcgacagagcgagactccgtctcaaaaaaaaaaaaaaaaaaaaaaaaaaaaaaaaagaaaatgaagaatgacagaggatataatcagtaaaattcaatagagatattatttttaagtcattgataaataaaatctttatcataatatttatgaggaaaataattgattctgatttaaataatttcattaagataaatatgaaaatgggaagaaattggaaacagattaatagcactctatggaaaattgattatgggaaggaattaaattggcttaatgatgttccctcaggaacttcatgaaaattaattcatgctgggccagttctgattaaaatgtttatattcataagttggaagtcaaaacatcctatgtcctgatgacatcactgtgtttcttggactctgctgtcttccatactgcaattctgccttctcacaattctcaccccagcccttccattgctctttcccccagtccttcacttctgtgtttttccccatctcttacccttatacacaggtacacaggtattccccaaggttccattttcagcccacctctgtaaatcctgtctccctccccctcttcctctcccaatttctctgcctctcttgaccacccccccgcccccaagcactttaatgctgatgacttccatcttcacatcttgcctgatcctttctcctgagtgccagttctaggcttccaatgcctgcctgactctttcctatggacgttccactgttgcattaaatttgaaccattcaaaactggattggcatctttctctataacctaccagacacaggggtatgctggagctggctcaaaccagcttgtgaactgactgtgtccatctcttcccacctccacattcagtggcactgtcctgggggcagactgaaatgggctttggtgagggcatttacgccatggaaactggcaaacacaacaagtagagccctttgttcaccagagaaaaaagcacacccttgcttatacggtaccaccatatccttaaacagcaaagaaacttgaagccatttcaggcacctcacccaccttaccctccacatttaattaattaccaagttatttgtattctacttctgaaatgactctcacacagccactttctttccagaaccaatgccactgccttagcccaaggtcacctgtgtgtgcctacgctcttgcaacagtttcctagctggtgtccctgactgccgtcttttataacacaatccatccctcacacagccacaggattgtctcactttcaacacagcctgcaacataccattctgctttaatgtctcaccatgttctaaagaacaaagccccaaaacatctcagcaacagtagatcattctgtgttccctgaccacaaaaacatgcacctatacacatccatctttgccctgtcccgagttccctcatcctcctctcaaggcccactcagctgagaagccccttcccagctcccctcagtaagaatgaactagtccctcctctatgcctacatgacctttgtcttggtgccatcctgttcttctggcctcatgctttagtgcctcccacttgctcaacttggtcagcaactgacttcatttccttccatttttaaaacatacttttgcccttaagtggattctattttcctctcaaccatgtattttcttcattttgcttccctaacccaattgcaattatccccaaaccataagcatctacagagttaaggatgcctactctgtctgtcacaatcatgcaagatgaaaggatgtttaaccccaggctgggtgttccaagtggctgcaattaaagcaaatcttttttttctccactttggttgactctatgattaaaaaagaaaatgatttcattaaagataatttagttgacatttctgctttggtacaactaggagttgagatggctttcactgccctgaaataatttagcatgcaggaacatcaagaaacaaggagcaggagtgccatcaacatagacgagaaacgagaaacacaaagggagccacaggggacaaatggcccatggttaagtttggtttgtcataaaaggcatgggcagccacaacagcttccggctagaaggtgcattggcaaccttcctcctgcctttccctttataagtttcacctccctctacctctctttgctccccacttcttaagcaactgaagagacatcttcttcatcatgtgccaaaatttagcaatgtgccactgcaaagaaagagaaccacaggctccagggtcctaagtgagatgagatgaaaaagcagcaagagggagtgtggctgcagaaagagcacagcaggctctggagtcgggcggaacaaactgacttctgccccacactcctgctgtcctcataagatccaagaagaagcaatggagtgtgggagcagttttctggcttctttctctccattgcttgggtataagggagaggagaagatggaggtgcactgccccagcacatattccgcctctcttgttaatgactccccatgggtgtcaggccacagcatcactccatttctaccctcagaggtgacacacaacttcatgttctctttgggtgactagtgacctcagttcactttgaacaaaacgtactcactggtatgaagatccatgtttggacaactcctctcacatatgggatggagtaaactcctttgtctatgaagacagattatttcttattaatggaaagttattaacctgaaaatctgcaccatatctaccagatcatttagacacaaattttattttattttcatttatttatttatttatttattttttgagacagagtttcactcttgttgcccaggctggagtgcaatggcacaatctcagctcactgcaacctccgcctcccaggctcaaaagattctcctgcctcagcctccctagtagcttggattacaggtgcctgccaccccacccaggttttgttgttgttgttgttgttgttgttttagtagagatggggtttcaccatgttggccagactggtctctacctcctgacctcaggtgatccacccgccttggcctcctgaagtgctgggattacaggtgtgagccactatgcctggccaaatctagatacaaattttaaaattaacacctaccaatacaaataatttttagtatttctaagtctgaatatccatttagtatcttttataattagaacttatgaaattttacacagaattatcagaaaagtgtcccacatttgtataatgttctcctcttgcaggcattctctgtctcagtctcatagcagttctctgtgctgctctccgaatgctgcaggagaagaaacaacatatcgcataatagcagacgaatggtgatctgctctgtgagaggtaaagacattttctgataagggataaaggaagaaaatggcaaaaagcacagacgcaaaaagatgtgctctctagtttttctttagggcatttactcgatagctaacaacagactggggttgtccgtgtaccgtcctgaagggagaggtgtccccatcttctccacctgtgacccagagacgttccttctctttccagatcatcatcctgaccctctcccctgaccatcctttctccccttctgctttcaaacaatcacagatcttctacagcttgaaacagccactgattagtgctgctgcttttctagaaaacatctccctccctcacctcccgtttcctttcttcattactaagtttggtttagaatcaatatctctatttcatcatcacccacccacacactttgacttccttcatgagctggctcaaattctttattaaactatttttattgcttgcataaaagtcaacgacaagcttcccttcaccacagaaacgagccttcctcatagcctctccaggcatgggacagtttcccctgccccactccttccggacatgctccccttcctgcacgtccaagcctctaaccctccttctcctccctttcctattggggtctaccgttgcccctagtgacgcaggggctttgacgtggagttcttagcctcctgctctttcttctctatgtctccttcctgaagagcctgaaccactgtgcggatgaagacatgggggaggcgtgtctcacgcacctttgctctacctcccgggcttcctcagcactcactgcttgagatcctcaaccgtcaacctggcttctccatgctcacaaggcttgcactccctaagtttcctaagtgtctacgtctataatacgagcattgaaatatctttcctgcctgatccagagggtggttggaataatggaatggtttttaaatcttcataaacacctacagtattggcatatcaattatcctaccaaccccctgactctaaataactctttttattaagccacaagatctaaatcctctccaatttgttctcccttcacctcggtgggatggtgaatctccaggtcctagggttttcctctgatgtgtctcacaagcccattcttgcccgtccagttcctctttcctcactctttctgcccaggtctccgtccgccaggacttgctgcctgcaatagttgcctaattcacacatttccaattttccctctttgatccattctgctacccccagaataatcttcctaaaccttaatttctaccacatctcatcccattccctaaaatgattatagttcccactatggccaggaaaatatccaaactcttctggctgactctcaaattctctacaatataaccttttctctccagccaaaattatttccaagtcattccaaagccacaacccacaacccactactcctaaatgtaaatgtcataactccctttgcagctccatgtgtgtgcctgtgtctacgttttaaatttattttgcataattcacactgtgcagtccactgttgactgagcatgtagttttgatccactttgtattgaaaactctaagcagggtaatatgatcataaaatataatttgaagggcattttggtttaaataatgactcaccatcgagccctccattggggagtcaggcccagagccaaaccaaaaaaaatgagcgacaagagtcaatgcattagttagaggcttcagctcagtatgactgatctggaaacatatcctgatgcctggttaagaaagctttatggcagaaaaaaaagaaaaatttgaactgatgtcctctgtctaaatcatgaataggaaagcaaaaaagcttgatgtgtctgttttaaaaataaaagaaggctaaatccattaacaggtgaaacaactgacaacggacccacatcaagccagagtccttctcagcatcacagaaatctccttacctagggccagctgaccatctgccagatggctagtggttctaagaaatccaccagggaccaaaagcaggggactataagattaggcatcacacaaatgtattccaaatcctggagctggggtcactgatagtctactacagaaatcaaaagaggtgcctcagaagacacaggctggcttcacagtcatccatgtgtctaccctgagatctcagaggtcacaggaagacccaaagatctatccagcagaaacatttggacagaagcaagtccaagagaattctttatattcacagctgctacagttggtcaactcttgattcaggcaggtttcaagcaagtccttcttccctccctggtctgcacaggggtgattttagggaatcataagggaagaaggggacgtttagaaaaagacaaagagtgacaccacacacagagtttcatggaatgtccatattgcttgccttttcatcacagatagtattttacctcattagttcattcatttgacacacagttattgggcctttatggtatgctaggcatttttaggtgccaaggatatagcaataaacaagacagacacagcccttagtttgttaaggaagcaggcaataagtcagcaaatgaataagataattgcagacagtgctaagtgatatgaagaatctgtaagtctacaaagaatggagagtgactgtagagtggtcgggaactttaagcatggtcaaggaaggaacaggaaggaggcaaagatatgcccccaactcctcgctcaactcccagagatgagaggtgcctcttggctccagctctgcagccacttctgctcaaaaggtacgctgcgttgctttctttattcctttgttaaacctggcaccagcaaaacaggcacctcaacacctataaatggttaggaatagatgggcatgcaagcttttctcctctactgattttactgggcataatagtaggctttttgatatacttgatctgatcagaaataaacccgaaaacaacacatgatacctgtaattgttttccctggtttaccttgtgtcatttctaaggcttagattcccatgacccccagctgttctccactgagtgctcactgtagagaaagttgctcttctttttcttcctgttctctagacgcacttacctctctaactctggtctacgcctccttatcaaggcacagatgcagctaaaaagcattccacctgctccctagcaaaggacttctttgttaagctttgacataaggagggaaaacagagacctcaggacttctactgtgttgacattgttttaagcaaggtgggaaaagagaacagataagcaagtcgttctactggctccactttcccaccacctaagtcaattcagagtatttcccgaacattttttacccatagattcagattacccctaagacagatggttatggtttattccgttttgtgcacacaggggtaaaagtcacttaaaattggactcaaattacttcaaagtttgatacctgccaatcaccatttcatcttgggtatacaaaaccatactgcataagctccaattgcctgattctaattttcaatgttttcccctttttaggtaaataccatcttcagtttttttttccttttttttttaatgagcagtttaatggaaaataattgctccaggtacaggtcttctaggcacattttgtctctgcagctattgttttaattagtgggcctgcttgttcgctgtccctttgttgtggcccgctctggggcaggggtgcccggggagggttcctcttgtggaacgcaggcgttaatgagccatttcagtaataagagtcctgccttgagccagaagtcagagcacccaagacaccccaagcagcagaaatgctcatgaatttctgaaactgcctttctaatttgcatttaaacataacttccaaagaacaatttcacctgtgattttctgagctggaaaggtaagggactttagatgttgaatatgtacaaattatgttaatataacggaggtaaatgaaagtcaaatgcattgtcatgtaaaatgtagacgtcttttctaaatgtctattttctaccaaggcttgttttattttccccctaagtgaaatgtgataattttttttaattaagtgaatctctataataattcctatttgattgaaactgattattcctcattttcctgtaacctagacttcggaaacctcagcaagaggaggcttagttggtgcctggtgacttcctacaatggattgaaaccaatctaatttaacacctgtgtgctcatcaataagtgtactcaagcacaaaagtgagcacagtgttgagcgattctgacactgactgcatgacaaccacagactctgtatccaaacactcgcagacaagaagctaattgcagtgatgaaaggcacaccactaaaagcatgagtaatcgctgcagtgatgcacagataaccctctctcctttactaccagggtgctgcggcatttatctcaaacctgtctctacccaatctgacaaccttttgtctctctgaccaatggaaaatggaaatgatttttcactactgttcccgcagcagtgaagggtctcttctgagtgtggagatttagttcaacagttgagtataaaacaaatgcaaaagctgacatttgtcatccatggcagaaataaaaggctaattaatgagatctgttggagtcccttctcccagtgcacccactggtgcccatggagaatgcacactgccttcccaaattgtgacacgtgtgacaaactctaccagagtgaatgatggtctgggaaaggtatggcagtgcagctccgtggcatggtgaaaggaagaaaacatcatcaggtttcaattcaaggcagtggtagttaataatggacttcctgaaacctgtagctcaatcactaagggaatattaagattttccacttgaaataaccaggattatgtgggccatcctagaagcctgctgaactggaatgcattcataccctggtaatcatattaacttactgttaggccaaggtcaacttgattttgtgtttcaccaaagctcactgggtcttttctcttgacagccattgggcaagtgagggatacacggttgacttgaagctggaatccacccagacccaatgaatcactgacctctcatttttaaccctaatgaattggggtagaattagatattttgaattatcatacaaagcagagtaaacccaacaatctatcaaaattatctaactatctagactgaacaattttacttggaaaggatatacctgcttatgaaatactaatgatgacagcaagaaagtctgatttcaaatctatgggtgccaacattctatgtatggtcatggaaatacatatgtaaacttgatacactgacaagtcatttcctatgacattttgccaatcaaaataaagtaaaatgaagaaaattgtttagaaaatctggatcttgtttccttaaggtgtatgtaggaggaagcagtaggaggcaggaggcattttcatttttattttactgcaccagtgtttggagctcagcagctgagatggggtgagtaacacatgagctttgatgagcaattgtggacacagccctttttgccaacatctcactcattaccttttccctccacttttttttttttttttttttgccaaaccaccctactagattataacagtctgcatcaagaaacatttcatttaattctggaaaggcacagccatggaaatagaagattaaaatgaaaaaaaaaaaaaagaaaaaagaaaaagagaaaacccacacaaaaaaaatgaaactaagagattctgaaagcagcatttcctaattaagaaggcccaagaaggtgacagatgtacccaggtccccacaaccagccagtggcagaaccaccagaagagctcattttcctagtgcctgcccaggttttttctacaatgctcacagcattgcaaggaggagttaacgccaattcttattcaaaattaaattctattagatattaaggatttctggtgggaatacttcagaaatgaaaaagtattttcaatttaaattaaattaaatttccaattaagtcacagagaactgtacttcaacaggaatctcttttactctacccctttacaaaagaaatatttcactttttttctttctggtcatcaattaagagttttatgtaaaatgtgtcactttcatctctgattaaaacgcatcctattttaggttttgagattagaagctgaggcccaaggactcaatgaaattgtatggcatcgttcccgcagatatacatacatatgctcctaggaaaaaggttcgtagcatttatcagattttcaactggatctataactcttccaaaagattaataagttctgttccagatagagctgaggttttggcaaaggtaaggaatccttactaaagaatcttgtttctctcaatagcccctaaatctcttcaactcacataattgcttttaaattcacaaaggaaatccacaaggcctacaaggaaaagcaaattccagcccccactaaaacgggaatggacagcaactgattaattctgcagtaatgaaaatttaatataaaacctttaatttcatttcaggtagcctgaacttcagattggacattttcagtagaaaacccatttctttttgttcctgtttttttttttttttcctaaaaaaggcttatatttacttgatttgaattttgctagcatgctttttcttctgaattcaagtgactagaactgaaattattccacctggggagaagagacagctgaaagccaatttagtattggttttcaaatacatgaagggtactcagagagaggatgattgccaaagaaaatggtctttgaaccatagaaagaatctgagcttgctctaaagttaaatttcctgacttacagagtttatgacattaaactgagagaccaagggatcctttttggagacttcaaaaataggatagatccttaaatgcctgagatggcttggatgtggctttgtctgaagtcaggaggataaatcttaccactgatggtcccttcaggcgtgtgaatctatgggtttgactggcatgtcagaagctagaatgccagcccaggacatctagagagtcatctctccaatgctgggtagcagtctatcaatcgctctcactgcctcaacatctctcagctcgcctccaccaccatagggaacccaaggcctgctcctgtctgaggctgatttccaacgtggcagagaactctgctccctcactgtaccacagcctccaccaatccctcggagagcctaagtttttgagaaaaacaaaaagaagtctcatctgtggtagtagaaattgtgtgaatgccaattttttttaaaaatcagtatttaactttgtagcactcctttttccttcttgaggaaagctaatagcccagctctgcttccaaaacaaacgtctctaagattggaccagtctttgcttttctttttgctggacaaccttgtcccaacttagaaatggaggagatatccatagccttagaccttcagattgggctcaagagcctttgtgtggacccaaaaggggaaccctaggggacacacaaggagctggaagttcaactcccccttcatctcacctgttgtggccttacaggcttagaagtgcagagttcttcagggatcctggaaaacctctggtcaaacctcatctgcaatgcatgccccttagtcaaagctcccagtatttgcccagctcctgctggagctcctccagaaagaactccatactcacaatcagcccatcccaacactgtcctgctctaaggaggagaagagctcagctgaaacctgcctcttcctcttgtccttacatgtccactccacactagtctgtaaaactcctgaagatctaaatgcagagaacgttcacctgggcagtaaagttcaaagagagctgtaccatctgctgcctctgaggttcaggaggagaattcctattaggttaatgccatttccccttttaaaatgaaacaaaatcatctgaaaagcatgtctgaacatgctttataagttaagactgctcacagaactctgactcccaggaactacaaatctaaataggataaacatgtttatatgtgagtgcctgttgtaaagctaaaaacccagcagataccaaaagatgctaataagctcaatatggaaaaattacttagaaaaggtttatgttatggtcttaacattgccaatgcctaaattatttattggtcaataaaaaaacccaatgcatcaataagagtaatattaaagtggaagttattagcaacttctaagacaggcccagcagctgacatgacaaatacaaaagctggacaccatcgggataacgggaacatcattctccccccagacaaacccaaggtgccacgtgtgtgcatggcatggcagggaagagatgaacaaccactataatctcactatctgtgtccccacaaaattctcatgttgaatatcataacccccaaggtgatgatatcaagaagaggggcctttggaaggtgactagatcataagggcagagccagttgagaatggtgcccttataaaagagaccccagagaactgccttaccctcccaccacgtgaggatacagcaataagatgttatctatgcgggcaggccctcaccagataacgaatctgccaccaccttgatcttggacttctctgcctctagaatgagagaaataaatgtttattgtttacacatcacacatactcagtgtatggtatttttgttacagcagcccacataaactaagacagcaactaacaggatcaaaggcaggtggtggaaggactgactacatgggctcttcaactgaagagatcaacgcaatgatctcttcaatagaatagtctgttgaagatctggaagtatataaatagggcatattgtattaatagatatatttgcttgcctccctagtatcctcaaaagatgaggaccgggactaagttgttcttgtatcgtgcaaagaccctgcagtgtgttatatacagtgtgggtttacagcaaagatttatactgaactccactgctttttttcccaagggaaaaatcagtgcctaagaactagctcatcttagtgagaggcagcctgtgagatgggctcttgaagaaaaggggtaagaaggctgatccaaagctcagaacagctatggctctgaggctgagaatatttagattcaaggagaagtctcataaaccatgagaaaggactattcagattccatgaaaaggagaataaacagctccccatctttagaaatttttttaaattctttatctcttttttttttttaagttagaaacaggcaggctggagtgcagtggtataatcacagttcactgcaaccttgaaatcctggtgtcaagtgatcctcctgtttcagccttctgagttgctgggattacagacatgcaccaccacgaccagctaatttttaaattttaacttttgtagagatggggtctctttatgttggccaggctgtctcaaactcctggcctcaagcaattccccctcttgggcctcccaaagcactgggattataggcatgagccactgcacccggcctattctgttctttaccttttatttttaaaaaatcattccctagttctactatctctatattcaaaatcctctttcccactataaatccactatctgaactccaaatatcaccaagaaccagaattccataaagtacaggcaatgtagatacgcaaacatggctctgagaatcttactgcctgtatttctcactctctatggttttcagctacacccctcttgccataattgtgtgcccttaattaaatctaagtttccagccattttttttaatgtgaaaactcataacaatgtccttgggtttatagcaccactattgtcatagcatgttattcaacctcagctagtgcttgacttaacagaaaattctgagtttcatattcattgtagtaacatcagttgtggaaacaaatattgtgctatttgcctttcccctgctgttcctcgatctcttttcagcctcaaaggctgtctggtacacttggttcttgtgccaggatggaagacacaagatgagtcctcagagacgtggtgtcaaggagtccatgttttctttcctctaagtgcagacagaatgactctctggaaggagcatacatgagctggcagttagagacagcacagctcagaaacaactgtgctggagggacatgaagaaaggcaatgatttctctttcccaatatgtggcaattttcagatgtcaaaggaataacagacagatataccctatgaaaggatttgatttgtggcaactgcttttcttttcctgattccattaatgccaggtttcttggccttaagcagagagccaggtattttctttttatttagtgctccctgggcagttattatctgtatcaattttcctttatccaggttaattctcttaaaaatacatgcctttcagtcactgtattgtatttaaccaaaatatctgttggtacaacatgctcttgtagttcatctaaggcacctttaagtcacagagttatttttaaagtatatgagttacttctgattataaaagtaattcaggttcactgtaacaattggaaaagagcaaaaagaaatgaatagctcataatgccaccaatcaagataagctctagtaacagactgcatatttataaaattgggatcatcctctatatattgtttttatatacttgtttttcagttaacatatgaaaattttcttatgacattaactcctcttcagaactatgtggttttttgttttgttttgtttgagacggagtttcactcttgttgcccaggctggagtgcaatggcgtgatctcggctcactgctgcaacctccacctcccaggttcaagcgattctcctgcctcagcctcccaagtagctgggattacaggcatgcaccaccatgcccggctaattttgtatttttagtagagatagggtttctccatgttggggaggctggtcttgaactcccaacctcaggtgatccgcccacctcagcctcccaaagtgctgggattacaggcatgagccaccgtgcccggcccaaaatcatgttttaatatcacattagggcatagagattttttccaattccttgaagtgtttaatgaaactatgatacatattcatgcacccaatcttttaattgtcttcactcatattccaaattgctcttcataaagttaacaactatttaaacttctagaaggatactagaagtttagattagaatcttggttcccaatccttcactttttcaagtgaaggatttcaagttttgccagtttgctagataacacattatgacaatgatatttttatttgcatgtcttcatattcattttcctacatgtttttgaatatctggaatcttcttttgtgaattgtctgctcaggacctttccctattgtttttagagcactggggctttttctaattgatatataagagtacttcatatcttaaggatattaacaaactgtctgcaatgttttcccaatttgtcatctgcctttgaatttgagatcatgtttttaaaaatgcaaacaaataggaacttagtatttctcacatgagcttcaaaatgccacttacaataatcagatgcatgttatgttcttgtccatggactgttaactactagagtcttttttaaaaaagagagccctgaattgtcaactgtgggaagacaaaagaagccagtaccttctgttgcttttttgccattcatagtgccaggacctggcaatgcctcaaagctgctattcctgcacagggctcttcctcagcctggagaagacacacacaagcaagcgaaggtgggtgggaccaaactaccaccttctggaattcagtttggccttccaaggtgactgatatggtttggctgtgtccccacccaaatctcatgttgtagattccataatttccatgtgttgtgggacagaccaggtgggagatgactgaattatgggggcaggtctttcccgtgccgttctcgtgatagtgcatgggtctcacgagatctgatggttttaaaaatgggagattccctgcacaagctctctctttgcctgctgccatccacgtaagatgtgacttgctccttcttgccttgccttccgccatgattgtgaggcctccccagccatgcggacctgtaagtctattaaacctcttcgtttttggaaattgcccagtcttgggtatgtctttatcagtaccatgaaaacaaactaatacagtgaccaaaccaaaagaacataaacataacagaaaaatgcaatccagcttaggagcttaggcaaccacagacactaagttacctgaatttccaagtttcattctggcatgctcactactggaaacattccttatgactctcgaggtctcagtttccaactcccctcatgctatggacccaggatactgaatcgactagacatttgtagaaaactttaaatgtggagtttttaactcataatgaaactaaaaaccaggcaatcaagaaaggaattatgatttaaaaaaatacagaaaatcagaacagaaaaaaattccaaattaaagatgggaaagttcaacagtggaggaaacagaacattatgctttatgacttaggttcgctcacctataatgacccaggtaattgccatatatgggtaacccctgaggaacaggatgtaatcttagtcacaatttgtaagtactcattcatacttcaagtacataatcaggcatacagagtataatccatacatagtttaataaagacaaaagtctcagccccttaaagaactatccaggtgtctgtggctgattggaactcaagcgtaagagattagaaatgtattaaatgaaatctaacttctgcttaatcagaagagcctggtacaagtatgtgattaattcaaagttttccttgaagaggatggtctcgtcaagtcatcagctaccagctatccaatggcagaggtggcagagctgactgaagcctattcttcatctagcccatttgctccatcctgctttgaatggtttacaacattccaatccttcaggtaaaggctgttccccaatagatcttgatcctatctctgtttttttttgttaatccaagatgattcaattctttttctgtgtgcactacttctgaattatttgtcaatgtctttgtgattactattataattattgttattaatatagcctggaataatatcaaatacttgacaacatctctgctaaccaggcagcgacttgaccttcaagggtctgctgttgtttgccatctgaggggagaacctcaagggcaacaggaccagtctccttttatctactgacttcagaaaggctggaaggcaaaaaacataatgatctgggcaatctaggtgagaaaaattcacttttccctgaattctctgtgtaaagaggctttaatggactgagttactcaggtaattgttctgcattggtctgagtttaatcaaaagaagaaagaggataatgctgtcagggaagcagttttcagaaggtttagagttttgcaattgtactacagagctccgaaaagtgccagcagagcagaaaaattaatgtaaataacattagttttaatttcattcattttggaaaaaaaaagcaacttcaaaaaggtttttataaaactctggttttcaagcatgagaaagaaaagctattttacataaaacaaaaaataaaataaaaaagctcttttaaaaaaacaaaaagatcttttacataaaatgaaacaaaatatagaagggttttgcccccagattgtaagaataagctttgtttttgcatttgttttagtcttttattttttaatttcacaacatagtgtaaattaaaatttaaaatgtgaaacttcaagtgttaaggcaattgtggctagagctgaacataatatggacagtgaagaaatacacaatgtatccaagattgatatgtaggtatcaattgcttccagtgaaacagttcattgacttctctacaggaaaggaatctatgagcttctaaatccagtcctgagtagaaaattataacagtgaaagagatcactttcactcagcttccatttccagttttatgcgaagtccttactttagtatgctaggaaacatattgagaggaaataaatatagtccccttctgtggcagcctggaccaagtattaaggttgcttaagaactaacctgaaagatcatctaaatgtgtttttgctttgtttgggtaacctataggatcaaaaacatgctacagctctaagaacgtaaaaataatggaatagaaatggaaagatgcatattaaaaatctacaaatctaaagacaaaatagtgtattaataccatctgttccagttctatatggtccaagtctgcccaccccaccaaccccccaaccccatcacaaggatctagttaattcacaggaactgcttgctgcctgaaattcttgccagaacacttaacagccccctcatttgttgggtggttttataggtctctggtgctgagctgaggtaggacagcttgcagtgtgtgaggaggacagataaaaccaccctgctgtgtagatttagtccatttgcactggctctcagacagaaaacaaattgcaacctctcacaaagcagccccgttctgcactagcaagcctgaaaaatgcaggcaaaaatgagtaaatcaggcaacttcacatcaggaggaaaaaaaatggctaccactctaacagctgctctcgtaattaagaacagatttcatcactaaactcttcctggttatgtctgcagcaaaacaaatacacagatgtgaggcatttgcatactggaaattgtgtactggataaccaaaccaaatttactttttctgctttaaaatattcccttaaaaatatccagtcaataataaagtataaggcaatgtccaaacctaagtacaactatatttctgtcatcatcttgcaactaaatttattttggcattctaccaaattcactttctttttacatattcgaaattgcaatggactgccatgaacatgacctcctttgaataatgaaaatgtgctacccatttcttttactcataaaatttgctaaatttattgctgcctcatttatctatgttttaaaaggctgcatggcacatgcagtaaaaggaatcgcatttgacctttttaaaggtaaattggtgtggagttagatcagagaaataaaactaatgaaatgataaaattacagcaaaaagtgagaggtaaggataaattaatggaaccaccccactaccatgagaaagaacaatttaaaattcacacaacaacatggatgaaccccacaaacaaaatgctaagcaaaaaggccaataatatacagcacaaaaatgagcaaaagtaattgtatcattagaagtcaggatagtggccacccttgggtgggtagggccatcacaaggagggggcacaggagagcttcttcaggtctggtcatactccatttcttcacctgagtgatggttatacaggtgtgtgcagtttgtaaaaattcttcaagttgtatacttaggattacttttctatatagaaattgtactttcataagaagaaaaaaaataaaaaggtgggccaggcgcagtggctcacgcctgtaatcccagcactttgggaggccgaggtgggcggatcacgaggtcaggagaccgagaccatcctggctaacatggtgaaaccccgtctctgctaaaaatacaaaaaaattagtcaggcgtggtggtgggtgcctatagtcccagctattcaggatgctgaagcaggagaatggtgtgaacccaggaggcggagcttgccgtgagctggggtcatgacactgcactccagcctgggcgacagagcgagacttcatctcaaataataataataataataataataataataataataataataataataatgtaggacatgcactgtgttttctgattttcagtgtcaaccatagcgtttactcaccacttttagccacaacctcttcaagcggcaaaatccatcctgcgtttacacacctttatgacactgtaatagcagtgtccttattagccatttttatcaagtcataagtttcactttttaaatgaataaactggccaaatgctgaagcttaagtagcacaatgttctaacagagtcccttatttagtactttaaactgattttcctccccaaaggtgcaaatgctacataattttctattgtgaactgtattattagtactatatttaaagcaaagaagctgttttaaacctgtaattttcagtcaaatgtggttctaagtgcattttaaaaatgacttattatactgttttacctaaagaacaataattcatacagaaatccatagatgtaaataagctgatacaaaagtagaaaaggaagatcatgcctattcaagatgacctagtatgttctaagaccctgaattaaaatgacatttcagtagggttgactgggagtttaaatagtagagcttttcattcagaattgtacttttccaagttgaaattatgctgtggagtaactaggaaggcattagagggcctagagaagtaaacttaggaaacaagtggtggttgttaatgatgagggtggtgataaaacatgcagggtgctctacaggctctttcatcctagttaggtctttggtgaacgaaaaggccgatcgttacaaacgtaatcacacacactttgctctaagtggcttcccagctgcacttctcaattggtgaccatcaatgcatgaaccaggggtcaaaggcataaagagactttctttcccctaaaaggagggtctctctgacctcaccctttgggtttgttcatctatttcaatattgttgcaaaggctgaagtcattagtgtttaaaccattaaacctaaaagacaggggtacggagaactttatccacattctttccattcatcaatctggggtcctcatttataagcgaaagtcatagacgatgtgtacctagcacaatgaagcactccacagatgagtgttcagctctcaactgcaatgactgcagaaatcagaccctatactctgggctggtgcattaagctaacgttagtttagatccatccacagaccctcctgtaatgccagtctgagatctagctgggggccaagggcagtgccacagctcatttaattgtatttattctcaactttagctgaaataagcaatgctacctggacttccccttatgcctggctgggggcatttgttttcaagcactttttctgtagccacaatttgaaaaaactaggtctgcatccttaatgaaattataagatttaagattcccattcattcttacagtgtgtacactctcctacctatcatctgctaccccaaaggaaggttcacctgtgagcctactcttccaatgcccatgttttaaaaatgtattctatgctgtttaagaagttaatgtccaggcagaactctgacagaatgtaagaaataaagtgtattattttctcaatctccagcctcagataatgcttgcttataaaacactatgaacctgttatgaaaaagaactgctctgtgatttttaaagcttttttatttaattcaacattaatttatgaagcacctgcatgttaagcactgtactcagtgccaaggatataaagatgaataagagagcatgccagccctccaggagcacgcagaacaataaaagaggcagctatgtgagccgactgaaaatataatatgatggatggatgaatggatgggaggaaggaaagaaggaacaaagggatgaaggatgatagatagatggtagacaacagagaagccagggagtgaaggcagggggagaagtgctatgaaggaacatagaaagcaactcattccatgaggagtagaaaagccttcttggaggcaatgataaagaagatttagtgccagcttgacttcatcaggcagggtgagtagatgcatatttctggtatggagaaattcacgctaaaagcatggaggcctgcaaagtgcacagcatgttagggggacaacagtcaagctctgagtagctaaagtatagtgtacctggcacagcatcctgaggttaaagctggaggggtgaggtgatgtaaagggtcctgtatgccggacccacaactccagctttttctcttctaggttagtgttttctagcataagtttcccagaatactaattctatgggttgctttgcaaaagcaaaaacaaaaaaccattttgtggccaagtacatttgggaaatgctgcctcctacaatctcctttcagagattagtaacatatatttggtctcgagggggctgataagcgtggcaggaaagaaatcagtttaacttggacaccatttttgcagaactcctgacatccctcggcactgggttctgtagaacacatgggggacactgaacactgccctaggaaagagaggacaaaaggagctattggagcatgaatgtaacatgatctgatttattttttccttttccttactacagaaaaatatttatttggcagtctatgtctggtaatgatatggaggttgaactaagtttggaagagattaatggcaagaagccaggtggtgattaaatgcagaagtgagagagcccactcaagagactttctaggataaaattaaaaggaattcacaacggattagatatggaatgatgggagcaaaccaaagagtaacttcaaaggttctagcttaggagccaggtggaagactctcctttaactaacagaattacagaggagaagcctgctctacagaaaaggtagtatggtcagtgctggtcattttaagtatggaatgttgcaaaaatatccacataggcaaatcaagatagcagttagaaatatggctcctcagcttacaaggaaggtcaggacaagagatacacactgtaatcacagagcccacagaagaagtcatctgaataaagtccttccaggaaaacacacaggacaaaagaatccagaatccaggatacccacatttcaacatataaaatacaaagttaatccatcagctttatggacatacaacatccattaacactgcagtcctagatctgtgtttaccttatccagaacagaatacagggctgagcccgacaatggtttatatttttaatatttgtcatcagtatatagtataaaggaatcaaaatatgtttggaatagaataggatctaattaaatacacctgaaggccagagcaattaagagaattgaccaaagccttatagctagtctcatttgcaactagttcaacaatgatttttttaaaaaaagaaagcgtgaatcatgggctcaggtttgaaaaggaccctgagaggtccatctgtgaattttcatcaaaattgtatttttaattctatgaaaaaaggttgaaaattaattcaaaatatgatattctctttcattttacttgtttctaaggcatttgaggatgcaaataaaatcagataattcacttgaaagtaagatcattatcaggtattagaaaagcattttgctgctttcccacgttatctttttatttttaattgctatgatagaagagtgctaacaatattagctgttttttattgatgtaattgagttgtgtttcatcagaatatcatgggaattagcctgtattcttgtaagggtggtcaagaaaagctgtattctagatcaacaatgatcttatcagctcacgcagccactcaacagacattatcaagggccttacatgagtgaggcacagtccttactcacagaggagacatccaggaaaaggatgaggaagtagcccactcacaactgagttcgaggaggtttccgttggccactacttaattgaatataatgcattcagtgaccagtatgaagtccttaaacacttcagtatacatacttacaatcctgcattaaatgtaacaggatttacaagtctcttttgtgaggaataaaaccaaaaacccaagaattatgaagtttttttgcacaacaatgtgaacagagtgaacacgatctaattgttcactttaaatagttaagatggtaaattttatgctgtgtgtacacatagcataaaatttaacatcttaatcattttcatacaactaaaaattttttatattatgaaattaaaatatctttaaataactgacgtttgtccataaattgtttgttctacatcctgcaaggattgggagcttgtcaatttttttgagctgaggaagaaagaggtgaaactggatctttaggaggattcaccagataatgctactcagggtttatgaaagagaaattgaatcagtggacactcagaagttaggaaagccagcatgaaagtgaaatatttaaataggaaggtagcagtaaaatttggaagaatatgagagaccttcgagaagagcaatcaacaaggtgtggatatggtatggatacggaaaaagaatccaagacgattccaggatgtcggatttcagcaagaacatggtatttattgttactgtcaacctgagttgaaaccaagaaaatgaaaatgcccagggcgcagctggaaaaaggagaccacagtttagatgctgaaccaccatggaccccaaagataccaatctgtggtgtgtaccagaaccacaggctcaaatgaggccccgctgcatccaaccttcacgaacctttatctttacccgtggaaccatcatgttctcccaaagataccatgctgctcacctgcccctacccagtcttcacctgaggtttacccaagcagggagaagggattaacagagaaaggtaaaaataatttcacttcaaatttgatgagactaaagaaatttctggagggccagatctcttctgaaaatttccctggctctagggagacagaagagtcaagcctttcacacacttaacgctcttcaagattctgacaactgttgatcttcttgccatgtttgggtcttagcactgcaggaaactcagaaactctcttgtaatctgcgcagaaggtcatttggtgtatcccgatccatctctgccgtgttcctctcgataaaacagcagattaaattaatccttgctgttcaacattcacaagacttgcaagtgtctcctctctgttgccagacttagagggaaaaaagctgagtcagaatgtcatgatttgaagttggagaatcttattgtgatgtataaggagatgaagaaaaagaaaactgtttttaactaaaaccttcagaaccttatcacaaaatgggccgggcgcaggggctcatgcctgtaatctcagcactttgggaggcaaaggcgggcggataatttgaggtcaggagttcgagagcagcctggccaacatggtgaaaccccgtgtctactaaaaatacaaaaattagccaggcgtggtggcgcatacctgtaaccctcgctactcaggaggctgaggcaggagaattgcttgaacctgggaggtggaggttgcagggagccgagattgcgacactgcactacagcctgggcaacagagcaagattttgtctcaaaaacaaaaacaaaaacaaaaaaacccaaaaaaccttatcataaaaagtcagtcttgacagattaaatggaacttttccacttacaagaagcatagccaatttcaaagattaaaaaaaaaaggaacttggaaaagtgaatttattttcactagaatgtatacatttagagtatcttccctatctctgtcctttaaatttaagcttaaacatttattttttattaaaaagtaggcatcctttaatttctaatctaaggaaagaatggtttaattaaaattttatttattttttttacttctgctagctatttaatctaggaaatacagctcagaaaaaaaatgcagtcataaaacctgttggtataaagataagcagtttatttaatatctaattaaatgtggtcaccagagaaatcacagcttatgaaactttatcagaaaaagattaatccatttcaggcttaacccaaatgtcataagagaactcatgaatttagataggaatccacttattatccaaagacgttttcatatcaagttaggtgagcctatattactagctatatttatacttacttcaatcaaatttatatactttgtagctatcactgatgtggggcacaattatcgaaccagaataagataatagggagcctttctgtctttatcaaaaatttctagaatgttctaaaacacttggagtttatagatcccactctttcagaaattaaaaaaattagactgtcattttaactgaaaagcaattccacaactaactactaaacacctattagatcttgggctcaggtgttaagaaaatgaggatggagaaaatgattccttcctttgaagggctcagaaagtcgtaagtgagataaacccttaaataaccactgatataaaataatgacaactgtaaggcaggggttgcttgtttctctccaatgcctagtctggacacatggtgacccagcttaaagacctcatgtcccagcctaaagctatagccaggtgatctctggccagtacggtgtgagaaaaagtggttcctgctcttccagactgcacctctatgggcaggatatgccctcccctttctgttccttcttcctgatggctggaagggaatatggaccatcttggatcatgtggataagactaacactcctataggtggcagagcaacagaataaagggagtccaatgtcacagagcagaactagcacactgcctcagattgacaatgatagaaaaataagctcttgtcttgtatttaagccactgttatttggaatctatcccatgaaacagccccatgctctaattaatatgtaacggagatgcttctttttctaaggatttttggttctgaaaaatgccgccttaaaagaaagaaccaaaattgaatagtataagcaaagaaaagtttaatttctaactttttcatgaaaaataacacctttaattatgacaatcaatcttataaataacaaaatagagattataattaaaatcttgtaaattctcagaaaagaataatttaagtaatcattggggggcataagtttaaaaataaaattatataaccacatgctggaactaattttaaaaattagaaaactaaaaactaaagataaaactaatatataaaaactaaagataaaaataatatacaaaaacgagagagagttggaaacaaaatggacacttcaaaatacaagaaaggcttaggaaaataacagtgaatgtagctaaaaatacagatcaaagcaattagagagaaactaatagatatgaaagaaagacaaaaatgattaagcataaggacagtttcagtaagggacaaatcaaaaacagtttgtgcaagtaatgtgtacaaacactttatcttttttttttttttttttttttttttttttgagacggagtttcaatcttgttgcccaggctggagtgcaatggtgtgatctcggctcattgcaacctccacctcctgggttcaagcaattctcctgcctcagcctcctgagcagtggggattacaggcgcccaccaccatgcccggctaatttttgtatttttagtagagatggggtttcaccgtgttggccaggctggtcttgaactcctgacctcaggtgatccacccgcctcagcctcccaaagtgccgggattacaggagtgagccactgctcccagccaaacttaatcttttttaaaaaaaaattccctgagctagaacaaactgatacgcagactgaaagaacactccatgtttcaggaaatgcataatactgagacatattttggttaagcttcagaaatcccaataatactttagggactcaaatagaaagaacgaatgatctataagagcaaacagagtgggcatcttaaaagacatcaaagctcaagagaggctccaaattcgatgaaaccaaagaaacagaaagagagaggtaaaaaaagtgagacactgtcatctctgaaatgaagctcaattcatgtttgttagttttttttccagatggtgggatttgagttgatttttaaacttcatttttcttcattatccaaattatctaaatgagcatgtaacctgtcaatataaacaattagaaattagacagaaaaatatcaaaaataagatggaatgcaaatatcccaatgaccaatttccaaagattattatcattttttaataagaggaacgggccttgaaggaataatctggtgggaaaactagaaaaggatattactccaggcatacgcaaagacagaaaggtatgaaagaaaatgatggtttaagggaatggcaagaggtctgataagtggatggagatcaagcctgggtcagattatatgctatgcttgaactcattctagtgttattctttatttttgtcactgatctgcctgacatcatttgaaccagtgaaagtagggttcaccctatatttgaggtacagaaactcaagtccagacatcagggacaaaattattagagctggagtaccagctctaataggaccccatcctagaagatgacagcccaaagacaagtgagaagggaactgtcctcagaaaatttgtgagatcagatgacaccaaataaaaataaataataatgtatggtaatttaacacatgtggacactacaggaattgagaagaaaggaaggggcactttggtggctggagcaggtgggggaagtggtaagacttgcactaggtcttgaaggaaggacagagcattttaacttaagatttccagtttcacaagaaattgtcttcataggtgactcctacctgtggctataattccataaaaagaaagcattttttcttgctgaaattatagaaaaaggatggactaataagtcaattatgctgggatttgactatttaaaaattaaataactaaagcctcatcttacgtcaaaacaaattccagatgataacttttcatctattcctttttttttttgagacggagtcttgctctgtcacccaggctagagtgcagtggtgcgatctcagctcactgcaagctccgcctcccgggttcacgccattctcctgcctcaacttcccgagtagctgggactacaggcgactgccaccatgcctggcaaattttttgtacttttagtagagatggggtttcaccatgttagccaggatggtctcaatctcctgacctcatgacccacccacctcggcctcccaaagtgctgggattacaccacgcctggcccatctatttcttttatagtgtcctatgttagatttaactctaatctttggtaacagtctttgtaaccatactaacaaaggaagagagagagatacaaaatttaatttgtccactaagaacaaaggttaatcaacaaactggaaaaactgtttacaatgtaattaggaaagattgattttcttaatatttaaacaactcttttaactcaatgagaaaaaatatatataaacacttcaacagaaaaatgggtaaaggatatgaacaaaaaatgcacaaaggtttatatatgagaattgtttgctcattttggaattataaattggatgtctaagaatttttcttaggaacaaatcacatatatatacaaaatttacttagtcactcattgcagaataatttgtaatactgaaaaaacctaaaacagcttagataaccaacaaaaggattatacaaataaattataggataaaatcactgaagttgtccaaataaatgagatgctgaaccactaaagaccaagtattgaatgttaccaaaaactgtataacgacatgggaaagtggttacaataagtaaggaaaataaattagataacaatcaaatataatagctttaatcccaatttaatcagaaagatgaagtacagaaaaaagaccagaaggatctgctctttaaccaaaacattaactgtgattatttccagattatagaaccacaggtgatttttttcttctttatgtttttgttgtagttgttgttgttgttttgagatggagtctcactccgttgcccaggctggagtgcagcggcgccatctcggctcatgagtagttgggactacaggcacctgccaccacgcccggctaattttttttttttttttttttttttttgtatttttagtagagacggggttttgccatgttagccaggatggtctcgatctcctgaccttgtgatccgcccgcctcagcctcccaaagtgctgggattacgggcgtgagccaccgcgcccagcccttctttatgttcttaatgttatctaaatttttataacgaagacctgttacttacaaattctttgctgtcctttgcagcaaaacttccagaaagactgtatgtaatgtctctaattcctcttcttgcttctttctcaaacccaagtagacgttggccccaaaaactctcatcaagggaaatgctgacctccatgttactaagcctaacacagcagaggtgacactggtaataactcccttcccttcttgagatcccctttcctcgtggcttcccgaagctatactctacgttttcttcctacctactgatcccttcttctcttttctgctggttccttctcatcagactgacccctttaggtagggatacaccacaggtcagccctcgtcacctgccctcactccctgggttatgacatccaggttcaaggcattagatgtcacgtgtatgctcacaactcccaaatctacacctccagcccagatacagatttcgttctccaaactccagacttgtgggtcacctccacttggatgtctaagagacaactcaaactcaataagcccaagtgagtaagtaaactcttgctcttgcccccaaaacctgcctcacacatagttttcctcatctcagttgatagtaacttcttcctttcatttgctcagaacaaatatctgtcctcagttcctctgtctgccaaccaagctgtcagccaatcttactggctctccttcaaaatatatagagaatccaatcttaccatctttgctgtccccatggtcccagcaactatcaccccccccccagattagcacaataacctgccaagccatgttccacttctcccctgacccattacagctcattctcagtgcaacagccaaacccatcattttcatacctacgtcagatcatgacactcctctgctccaaacccttcaatggctcccaattctcacagtaaagccacagtccttactgaggcttggcaggccttgcaagacgtggcctcccctgccacttctcccatcccatgtacaccactgcagcatgctgtcttgttgctatcccaggcgaggaggcacattcccactcagccttcactccagctttccatcctactccacctggcatgtgccttctccctgccatgtcttcctggctaactctaccacgtcccagcctcactgttctcctgctcacatctcaatgtctcagtgcagtgacccagccaccctcttgatgctgcacccagctcccaccctccacccccatgggcatccccagccctctttcccctgctctgctttttcctctctctgtaccacttactgtcaactgccaaaaggttaaaaatcaaaattctaacaggaatttaggtaggctatggtgacacaggaaggctcctctgactttcaggtctgtctggtaaagggtggcatgaccctgtgtgaggtactgtcctgagggacacagtaaggacctcgtaggtacgaatcagtcatcaaagatggatgaaaatgaaatcgccagcaattaagaaatcccaggggcatgaccaaagctaagaagcgttaagttatagatgggttgatttgttcatcagcataagggtcagagttgcccaaagatgaaaagggcaccccaggagggcaccatccccttctgctggggggtttcaacatgaaagtggggggtttcagcatgtagcagcatgagcctcagcagggatgccacagagagcatagagcatccctcgggggatggaggaggtcttcatcgctgatggagatatccaagaatgggggagaggtgggcagagggcctgtctataccttttgtcagggcttatagagagaaatagctgaatgcatacatttttctattttctgctgttaatccttttgttacacacataaggggtcaaccgtttagtgtgtattaaaaacatgccaaggcctatatggacacagatgctattcctgaaggttatgtctgtcagataacaaatacacagagctcaggagacatacacggcttatgttcacctaaattatgaaacaatgcagcattcccatgaataactgaacgaggaatcgtgacagaaacaggattggtaaagtactaaatggcatgcagagaaaaaggctgagagacattctgggaaacagcaccccatggggccaatgggtgtttctaagaactctgcatattttaggtctttcgtacattaaaacctagttcatgtggcagagacgctggaaatgtgggctccctcctatattgctctgttcccctcatcaccctccttattcccacatcatcttgtggccacagaacacgaccatctgtgggagcacacgcacagcacacccgcacacactacccccggggaaggacttctgctcatgaaaatcaaacaaaggagaacaaggaaaaagaggcagagaacacagcgtcccactcagagcactgcctgttaagtgtttgtttctgaggccagcatctagctctatgatttattttatatgtgctgtgtttacatacatcagtaaatacggtttccatttcgctttgtaacagcagctataaattatatgttggaagtgtttggctcctctcttcccataaaggtctggcagggattacggaggccccaacacgggaaggcccaggattggtggggagcaccttctttcatccatatccttaaattaattaactcacccaataagtatctattgagcacaaactatgtgccaggaaccattagagatgcttcagtaagcagtaccatgaaaatgggacaaaataaacaaaaatccctggttttgtggaacttataatctagtgaaattcatccacctctcttcaatttctacattcagagctgtcaacccatctggggttggacacatgagcaggtaaatgcaaagcaaatagggccactataaataactataggaattattatgagtgtgaattgtttctgagggctatgtgccagccaccgtgctaagcactgtaagtactaactcatctaacagtcataaaaatgctatcaggaggttctaccatgattctgtcacagatgaggcaactgaggcaccaggccatctggccagcaaatggagtgaagaaactcagacattccagctctagaacccacactcctcgctctgctctagaaccgggccaattacagcagagagaggggtcccagtcagtatcacttccagaggcatctcttggtcccacagcccaccctttggtcagaacagcaacaggagtgtccaggcatggtcaacgggtgcttgccacatgagtagctatggaatgggatctgcaaacagcaccagggagactccattttcatctactgtaaatgtattgctaatgctggttaatcatgtggagataagtgattctactgctcagcccaattaaacacactatttaatacactgtggcttcagacagatctgtctcaacaagtcattctaaatgcttactatgtgaacattttaatacttgtcctcagctcaaatcttgttgatttagtatttcatttaattgggaataaagctctcatgtgataggttccactatagataataatagctcagaaaaaacaaatacgcagaaaaagagagaaaaggtgatctcagacttgaaaataaaatctcaggagggggctagcatcaaataaggaagaattacgctcactactcaggatttgtgatattaatccaggataatcttggttttcaagatttcagttatttctaatacaaaggaacttgtagaatttcatctctctctagcacgcgcgcacacacacacacacacacatacacaaacataaaatcactctcaacaatatactcgcttttctattttgtttgcttttgtttcaaaggtgtttaaataacagaaatgtagccaatatttgccaaatgcttagtatattgtcactgtgctaagcatattacatacgtctcattcactccccgctgctgcaataactctgccaagcaggtatcattatcatgttctccacctcacacataaggaaactgaggccctgaggaattaaaccacttgctccccgtcacacggctgacaggtggcaggcccagttcttgctggtctccatagctgcacccattccacagcattctacctcttccctgtatatctgaaagactgcacaagatttctgaccaaagaaaggatgaaagacacaagcttttctcacgaaactggaagagtgacacctcctttctgggtggaataaacacgggatcacacatcactttcaaccaactccaaacacagaagcccgggggttcttgagcagccccaggtgcggagctcaggccctggaggctgcagctgaagggaaagcagccctgtaatctgttcagacgcattccgggggagaaagctttacgagaactgagaaagtatggaaaataaagtgggcttgctaataatctccctccaggtcccaccctccacgctttctggtcagtggtagtttcccacccttgaggctagaaaacttggcttaatgatataagtctgaaggagcccagagaggaaagagaaagcaaaaagtctctagcaccttcacacacacgatacattttaacgcactttcttcaaatttctcatcacaagactatagaaactgaaactgaagttttttcatgttaaatgccttacctttttttctgttttgttttttggtttttggtttttttgagacggagtctcactctgtcgcccagactggactgcagtggcatgatctcgtctcaccgcaatttctgcatcccgagttcaggcaattcttctgcctcagcctcctgagtagctgggattacaggcatgcgccaccacgcccagctaatttttgtatttttagtagacacgaggtttaccgtgttggccaggatggtctccatctcctgacctcgtgatccacccgccttggcctcccaaagtgcagggattacaggcgttaagccactgcgcccagcccaagtgcttcaccttttaagaccccaatggccaaacataaaaggactggaaaatatggaaatatttccacttgccagtcttcattacgaccttcagaacgacccatctaaactacagaaaccaagtgcttccctccagcatctgagatcaaggtttgggtctccactctttcgggtatacgcagtacaggcactccacgttctaagcggacggaagctgcccatcgagcagacaggaggaagcgcagagcgtaaccatccgtgctgttgctatgccacgctgtcctgagggacgtggcctccgactgccatgggtgagcgagggtgatgggaaagatgacaccacgacaggtggggaaactgagtctccaggcttgccacacaccctcatttctcccaggagcaatcagatagcaaacttcaatttgaaaacattatacatctcaaatgtaattaagaaattcgactggcatgaatatgtaatgtacacattgctttacagatgccttttttgcccgacaggctggtgccgactttcatttggaagaaatccattttcatacaaaggtaaccaagagtgacaggaaataggaagcctacatcatttatcttctgtgaactttagaaaaaatcagttaattgcttttctaggaagctattttatggaatcgcagtgcttcatctttctattctttttcatggcataaacggcaattttaaaatgcccttcatgaaaattctatgattaatcaatacatcttagactatttaattacttattttaacaaataaaattctgatcaaccataaatggtttctctgttcttatagatgaattatcaaccactacgaaaacatctaggataccacagtctattgattgatatccaaattcaggtgtctctttccttaccactgactaagctatgggcaccagctcctggcttcctctgctctcctggcttatcaaatgaattctgttcccagccactggagccctctgcaacagcagtttcaaactatcactacttattaaattgcaaacagaaaactataaatgtgtaggttttggaatacactgctgaagctgtaacttgtcaaaccaccaactgcaaaaggcccaggacactcctgtgttgtctcaatggctctgcatgttaggtttttcacaccactgtcctattttgtgccctgcccccatcacctaacatatacatacgtatttttaaattctaccaagtttaggctaatgtaacttttttcaaatccaaaatgatcatcttagtaatgattttatattattccatgagccaaagacagatacactatgaagttaatgatgcttaagcttcagggtctctaaggctctggggagttgggggtcgggggggtgggggtggtactgtgttaacacagttatatgtctttgaaataatggcaaaggtgagatattttctattccttcatttctaaagaagatccccaagactgcaaatttgaggtcccacaaaactgtatctgcctctctaggttaacagtccccaatgtttgaatctggaattacatgctgagcacaaaatattaatttgcgtgtgtgtgtgaacaaaaaataattcacttcagtcagaaataaaattcagtgtgctgtgccctagaacattctagagggcatgctttggctattcgttagtccctggtctctcacccaaccatagacagctttccaaggggcactcccagggaggctcacttaatgaggagtggtgttcagaataaaagactcagctacaacaacaaaaatatgtttttcattaaacacaaaactgagtcggaaaaagccagccaagaagcaggtgtaagagttaaagaattctcttgaggtctttaacttctacatcaaattgcactggatttttctgcactaattacctattattgaagtctcaggaattactgcaaataatttgccatagcagcaggtagggtgcagatgttgtaagggaaagaatgaagagtttatgaagtgtaaaaccaggcaaagggattcaaaatttccaaatttttaaaaataatacagaattgtttttctactacaagggtgatgaaggtgagggaattttcctagggctaaaaggccaattttaaacttaatttggactgtaaatgagagaaactgcaaattaaaagctatgtgctgcagtctaatttattcagttaatgtaaatttcttggaggcagagattacatcttacactaaaaaaaaaaaaaaattctctcattgcattgcacctagttattaatctgattttcttatgaggaatgtacctatacgatgccaaacagctatttttgtatggccctccttgtttttatgtcatttttacctaacccttccagcccccaaattcttcacactgtgataagtcttgctctgtagctaacatcctcaaaaaccatagtcaagtaataaccttgcaggttattttctttggaaatttccctaaaaaacccttctctacctcactggaagttaatgtctgtactattgagaggacattttcataccagcagtatctttatttttaaaaatattggcatgaatatttttgaaattgtcacattaaatcgttttacctctttcaaaaaataaaaatatttattccctcaaaagtaaaatctggttgataaaattcttcagcttctatgttatgattgtgaattttatttttttatttattttttgtagagatgggatctcactatgttgcccaggctggtcttgaactctggcctcaagcaatcctcccacctcagcctcccaaagtactgggattacaggaatgagccactgtgcctggcctgattgcggattttattggaatagcctataaatattgaacaatgcacctgcgaaagagtatgtcttaatcttctcttggaatactgtcaacaaagatctctgagtttgaagggtagaagtaactcactacttggctgctgactgtgaaatttagtcatgtttttattgtgggagtggactgattaaacagacaagtgttataaggttcaaattacaacatttctcctaatatgcagtgcttttaactatgataaacactgcaccccccttcacaaaaaaaaaaagaacccacccaccaatttttaactttcttctacaaacacctcttatctcttctctatcaaagcatgactggcctttttgaaatattcaggacaaaaagttaggaagagggcaggctcgctagttcaatgtcactacatataggggaaatggaacacttcccatagaaagctctgatttctctcagcgtgagtctctgtctgaggcatccccctctctctctgctaaccagacaccatacacagcatgttctttccaatctgagtcctcaaagggcatcctgaaagtgtccaggttattaatgacatacccaaaagcctcataaaaactgcacagttatctgcttaaggctttactggcaatcaaaaattcatctttttttgttttaactagagttttatgaactcactgaattccaaaataaacaaacatgtaaattattacctaataaatctgaagtttctttggtagataaaaaccattttaacaagaagtcaattgagattgaaataatgaaggggttcctggtggttgtaaaagtcagtcaccactgctcaaagatatgccggaatttatttgctgctaccagtcatttgatgatgacgaatcaaacagcctgatgaattcagttttgtaagatggtacctacgtgtgtctcctacaaacttttaaaaacgtaaatgcctatagaaattacattttgcttccattagtttctagtgaacattttctagaatctatcataaacgtgtaatcaaaaaaagttacggtatacctgtcacttgatcttctctacaaaaccagtgtaaacatctcatagattaaaaaagaagtcttttctaaacggtgatatgttgatatccctatcagtccgtggtgatctctgagatgatagttcagaaatgtttaagctcagccttgtcaaaaatgcaacaacaaatgtcaaatcattgctttcatttggttattaaatcaaattaagatacaaagaatattctggccacactgttactcagtctttaaagaatatgttaaaaagagaaaaaactgaacagttcctaagtataatgttctagaactcacatttaattttagttagtatacaatatcacagcaaaaaatatgtatgcatggtcatatttttttcttcatgtactcttcacaaccatcatcaatttggaatatggtctgagacaggacaggatttccaaaacatttgaatagttcaccatattcaaagttgaataatttaaacaattaatttaaaaactattatgaggtttatttggtaaagtttgtgttaaaatatttcaaaacacgaaaatgttaagagttttggaactcttttacataaaaatttaccttaaataggtaaatagatactgaaattatagcctttaagtgcttttcttacttctgaatcacttattcacttatttcttaattttatttataccctcagtgaacactagctattcagaagaaaattctcaaactatagtgaaggggacattccttccctaactaatacatacacacacaactgcatttgctggaactctaaaaattcaaattataataaatttgagattttaagaaatcactatttaagtctgcctcccctttcagtgactgctacaaatcctaccacatgaagttaaccacatcactgaaaaaaaagaaacatggaaactgaattcacgagggtcaaattgtcacttgtaactatgcagttgcatgtgaacggtgctgataaagactcacctccccctgcttggggatgctgaacttggagagcttggccttggctctggcaggctccggcttgctggcagggactcccctgtatgatgtgcagtgcacgctggtttccgaagacgacttcagcttaggagactcatcaggggcctgatcttggccgtccattggcctcacatacgcggtcggtttctgctggaccaggctgggttttgaagctagggatggaggaaagttctgaacacagtgtccgctgctgctgtgcttggccgccatggcaggtggcctctcctgggtctgaaggcccacctccacattgcacacttgtttggcccgaggctgctgtctgccaacaccatctccaagcaaggtcctgagagagccctgttgtgctgagttggaagaagaagaagaggaagataaggatgaggggggtcgacacatagggattttcttttttcattatagttctctgggttttagcagatttgtgcaaatcaagcaacctgtgcctgtgcttacttgctctctgttggccgtcagagggtgggtgcccagccttctgccagcccatagtgcctctcttactctgctgcacggggacagctgctggtgtggaagttgtagtgctacagatagacgagggctggttctgggctcttgaatctgcaacaaaatgttcatcgatcttgttcacaggagtctgaggaaccccaggtttgggaactccaacgagatgactctgattggatctatcagttaaaaagtctttcatttcatcataattgcctaaagtgttctggatccggttggagagttcatcccccttgttagtctggagaaagaaaaacacatccacgctattgttagagacaacagaaacaccggagataatcaacaggtgcccttatcaatcacagagccagggttgtcacatgcagaatgagagctgagagatgaaatcgaaatccttatcgtctctgaagatgtctgtcagcacttggtgatgcaccagaacaggaagcctgtaatggccttggggtgcataaaaagggatctatccggccgggcgcggtggctggctcatgcctggaatcccagcactttgggaggccgaggtgggcggaacacctgaggtcaggtgtttgagatcagcctgaccaacacggcaaaaccctgtctctactaaaaatacaaaaattagtggggtgtggtgtcgggctgctgtagtcccagctactcaggaggctgaggcaggagaatcacttgaacctgggaggcagaggttgcagtgagccaagatcacgccactgcactccagcctgggtgacagaaggagactctgtctcaaaaaataaaaaggagcagggggatctatccttggtactgtgtgtgttgcagctaaaacagattacctggaaatcaggaaaattaactattgcaactttaaaaaatgaactggattaagtctttctatgattggattgtcctgtaattgtagtcccgttagaagctttacttgaaaattcagatttggctcgggattagtctaaatatcattcttgccagaaatccagagtgacaggcaagagatgtcaatgtgaagcttaaaggaacatggggctaaatgtgcaggaagctggaatgacccagagctccatgccgcctaaggtatttgtgaaatctgggatgacatttcattttggaagcaaggttatatttctggcctttggtaaaaatgagaaataatcttagactttctttctcattagccctaacaggtactctaatcctagcgtgatccatgtacgacaaatatgtaacacaacctccttctaatagtgtttgtttcctacgatctgagaaaacataacaaatgggattgaccttataatatgtcaacgcggagatgaagtctgtattattgataaaaatcacagcaagcagatctcaatagtaaacaaaagttgcatgttactgagggagtggccagtaaagccatgtgaaccacacacctcaatttctgggggaagaccccgtacttggtggctgagctgtcttccctgggctgaacagacagaagatgcagtcaagtttggtcggccaattcttttagtcaaggccaccgtcacagggagtgagagaaacaagtgagaggtagagatgaacaactgaaaaccatctaccttgtagggctcactgaagagagagtaactagaattaaacgtgccatcatcctgttgagtttcttgatttcttctttctcgttctttcctccgtaatgcatttctatctggttcatagacactgcatcaggaaaaagaagagagaacaaccacacacacaaattaaactgtaaagcccaatgtaacacttgtgtgagtgcagaagtctggttcgtggacaaatggtgatgacaacaagaacatggatgagacaaaagccagagtcatcaggcagtgtgctggggtgtctaacaattacattctttggggggaaaagaatccttaggaccagttccaaccagtactaggtttctcttcctggtatgtgaaagaggaactgtttaagcaactttgacaggagaagactgaaagtaatcttaaggcagacggtaattacagtgatgtgtaaatagaaattatgagcatattttctctatgacagagcttctgagtgttatatgggaatgctcctgttctttttttttttttcctttttgcatggctgtgtttctgcagtgattctttcattaactagctccctaaagagctgttaaaactgcatgctgcagtggttttcacagttatgagccttcttctgatctctgttaatcagtcaagtcgtcaaacgactactgaatcaattcttccttctgatatatttgacactatcactcctcctaactatgaaaaatgtgccaggaggaaggggtgcaggcaatgaggggagagaacggaaattgaattatgttgtgtcatcaaggaactccgccttttgttgaagaaaattaatatctattctctcaaaatacaattatgaagtggccaggcaccagacaactggaagaaatgaggaagaaataaagtgttccttccccctaataaggagaaaacaaaggggctaattcaactagtgatgaggaagtgacctgtttactgaaggaaggaaatgcacttgtttttctggctccctggataaagaaatctggcctccgtgtagacaacagaaccaacactaccaatcaaaaagagcttacagatcccttaagatgagctctgtcctcctttcccagcagaagcaggtgggttcagtgacctggccatcattctgcttccagctcccacttggtctagtgggcagatgctgagctgggagttggcacactcacctgcgaaatgtggttctccccaaatcagcgacatggggatggaaaagccactcggtctctctacgccttaatgacttcattacaaagcaggggcgtttcatggcactgttataaggcttaaatgtgaaggtaatctataaaatggctttggagtagctttaggtgccacaaaatccaacatattgctaataaaatattgttaataataaaaggatctgtgggttcaaaggaacttataaaaattgtgatttttaaaagctaaataactatctttagtaaaacagaaagtatatgtatcatgtagctgtagggggacacacaaattattgtaaaataaatattgcttatcctagctctgcccgtgtggctggggtacagtttaaatttgctgtctaaggggtgatgcgatactaaacatgcttctggcaaggctgctgcagcacctaaggcatttaatttaaatttaaggttagggaatgtaaagatatccagaacatggagcctattagcattttaattcatccttagtatattacccacagttattagatttgggagtccaaccagtgaccttcatataacggggactgcagcctctagaatcttctaccaactgagaggctcacagcgctaacatcacgatcactgatcactaagaactctctggggtggctgtggtgacagtgaccagcctaaggaaagcaggagatgggaaagacactcttattcacagaaccagacttccagttcccagtagagggtatgatggtcctgccctgcttgtggacatttgtaatatgaaaccccggctttcaggaacattccatggatttaaaatggagactgctctgaggatatatgacccacactgcagatggatatgaagtagcctttaatcaacaggagaattctagtttcattatgcacttctagcttttggaacaatattgacacctgcagttagaaaacaaaaagcagccgggcgctgtggctcatgcctgtaatcccagcactttgggaggccgagatgggtggatcacgaggtcaggagatcgaggccatcctggctaacacggtgaaaccccatttctactaaaaatacaaaaaattagccaggggcggtggtgggcacctgtagtcccagctactcgggaggctgaggcaggagaacggcacgaacccgggaggcggagcttgcagtgagccgagattgcgccactgcactccagcctgggcgacaaagcgagactccctctcaaaagaaaaaaaagcttgcacagcatgcatcataactctccccttttcccatacatagcagggactcccacacacatgcttgctgccctcagtcaggtcaacccaaccagacacacaagactggtgtgatgcacgaagtggcctcatgtaagatggagcaggcaggtggtcattgagaatgatttctgggcttctcagaaggcccccatgcccaaaataatacctcctgcatctgctggctgatgactgaaattccacaactagagagtcattcctctggtttaagatgtcttcacccctgcaagaaatataaacaccacaagaagctgaaacactttaaacctgattagccttgagtatcttagcgtgcatgagtctgtcagcatattttccagaagccgaggggaaagaatccaagatcccggagggtcagaacgggaggcaagctgaacaaaggaagggacaacagtagatgcagccatgaaaacagattcataaactccacttatttttcagtgtggcttaaatgtttaagacaaaggcaataggataaaaaccaaaattaattaggcagatatcagacccaatacatttccagggtctgggagttatgagtcatgtcctactctgaaaatgttggaggtgagagaaaagatgctcctctttaactaaacctgcctcatcccccaacccctttaagctgaaggataccccaaagcactccaagatgctttataaagcatccagattgctagataaaatccactaatgaagttctacccgcataaccagcctacagctcctactaccaagaaggagtgaacaccctcaggaccacttactcataatcttctaatagaaatccactagtcgtcttttcaggggcctgccatcatgctcgtgccatgcttccacaccataagatgaacccagaatgactcaaaatggcaacgtccccacttcttcaaaggagaggaaaggaaactcaaaaagaaaggcaatgccttccctttggtttctctcctccttccttggtgggtagctctgtagcctccactgagctgcttcttaaaactaacctacccattccttctctttaactagaagcacaagccccccaccacatatcatttcatggctagggagctaaaatgtcacttgcttaaagcagatgtcactgtaagagaaaggctgggcttcccaccccctgtatctccctaagtgtctgaactctcacctttctaccaatactaaatgttttgactcataaagacagtagcttctcgacagtgagcccccatcccactaattacaagtgaaaattgtgccggtgctcaccagcctgcagagtgcctttctcttcatctcttgccatgaaagcttagccctcttcgtccccctgccatttgagcaatgtgaagatcatgctttaaaagcaaagaaagctttcgcctgacaagctgaaagtcaggtcagcttcccctgggatggctgacttaggtctaagagaattccaattcccggcatgccaacatatacattaaactcaaaatgtgttgcacgttatgagttatgtttctttgttactagcagatggtaaaaatttctatcatctgcaaagttgctcctatttccataaaaattacaaaaatcacattcctcaaatgtatgtcaccaaatgtatttatttattttgcatgaaagtggaggtagccaactgcttcaatattatttatcatttgttgcagatgcataacattcccagaaaataaacctttttaatcaactccttttaaagggcctatttatttttagaattaaaaaaaatagcaaataaaaaatgtagtgaaaacatttttgatcatttctcacttatttgtttttaatctataaattgcggtatcttgtagagctccagccaaggccaattatggtggttaagtagaaatagacgtctaaacatgaaactgtcatcatttccaaaattcatctattcttgatcatacggtaacagcatgaaactaaataaaagtaacatctatgagcccgatggcttttctcttccattgagctcaaaacatttcacctatatgtcccttaattatcctcacaatgccccttggagaaagacactgatggtgaatattatgactaggttaactcttttaaagatcaagaaacttaggataagagtttgatcatcaaaacaatgtcataaagacacactgtgtaaaaggaacagcaatgtccaaagtaccttactcagctctgcccagagaacaggagctatcctggagccaagaagtggtggcacctcttaaaccctgatgtctgacaagcccagtagtgagaagtagttaacatgagccccagaggcaaaacaggaataaatgaaataaggcaagctatttcccagtcagacagagagaaccataaggagaattctggaataaagtctcagctgttataattttttacagcccccaactgacaaaggatagaaatcagtctctttccacagctcacacacaaagcagacctatgtaacctagaattgtggaatggaagatagagaagtgaataaaaaaataaaaaatgataagattctaaagttgcccagcgagggctactgatgtcactatttttatcaagtgctacccattcattagcctgctccaatctctccctaggctgccctactggtgagaaaggtgctggagccaggacagcctgccctctggctgagtcacaggttgattcagcagacccagccagccagggggggatgacctccttcccactgcactcatccacatgcagcctgatgaaatctgatgaaatgcagtttgcttggagcactcgctccaagcaaactgcatttcccatggaggagacttttaggcaagggtatatgaagccaattgtatcccttgactagaatcatcaaaatgttttattcttatttttaaaaaactatccaaactactgatatgtctccagggttgtggggagtctaagaaataagcaaattcaaggagaagagaatgaaccacctctcacctatcttttggaaaaagttatcatgttttgcatgtttttaaaatacagtccttttcaaataacaaaaacacaattcactttcgtccaaaagcattttctgaataccactgtgtcagatactagggagacagggtcgtgattgagccatcctgctgatgagaagacaacagtctggggcaaggagaatggggaaaaggaagaagggcaccaattcacaatcaaacaatgtgagcagcctgtggtcagggcactggcaggggtagcacaaggaatcagcattgtttcctgcaggagaccagctttgagcttgagaaaacggcaggttaaggagatggaaaagaagaagggcttagaggtacaaaatacatggattactagtaagtggcctttgggagtatattcagaggcggttatgttactctctccatacctccataccaccttgcttcctttttttttttttttttttagacggagtctcactctgttgcccaggctggagtgcagcagggtgatctcagctcactgcaacctccgcctcccaggttcaagtgattcttttgcctcagcctcccgagtagctgggactacaggcatgtgccaccacacccagccagctaatttttttttttttttttttttttgtatatttagtagagacagggtttcaggacgttagccaggatggtctcgatctcctgacctcatgatccgcctgccttggccccccaaagtgctggaattacaggcgtgagccactgtgcctggcccaccttacttctttaacaaggtggaattcctcatttaaagtttcatttatgtggtttacccactgctaacctatcattgctacctcactctaaacaggttcgtctgatcccttcctaagagcagatttggtttggagcaaatgcatgaagagtggatgcagaggacacagagaaacactctccccctttttacagtttatatcaggctgcctctaagcagcctggccacagagaagacaatcttttcagatactttgagacctgacaacatgctaacatgctccctgggcatggacctggagccatgagggtgaggaggaagaagaaaaggcataaggaggagagaagaacgttccccagaaactcccctgctctccagagcagcagcgtaagcactgtgtataattaaggaaatttaatcaaacactccaaatttataacaattgttttaaatttaatgagtcaaactaattaacatctcttgttatttataaagcaaatgataaaaattaaaaattgttttttaaattagagtaaagcaaggttgctgaagtgtacttgcaaattcccttcttaatctatagacatagctggtggactgaaaggcagaaagacagtgagcatgggacagaggcaactcagacagagaaggtgaggctgaaggtagaacgtggtaaaaaggcaagaatctcccaactggagtcttttgaagctctgagttgttgtggttgtgatgctataggtgcgatggtggtgatagtggtggtggtggtgatagtggcagcagaagtactggcagtagtgttggtggtagtgatggtgatgatggttatgatggtggtggtggtggtgatggtgatgatgatggtggttatggtagcaatggtgacagtagtggcagtgaaggtgttgtggtagtggtggtggtggtggtgatggtgatgattgtgataatggtggtgatgacagtgatggtgatggtggtggtagtggtagtgatggtggtggtggtagcaatggtgatggtggtggtgatggtggtggtggtagaggtgctggtggtggtggtagttgtggcgatgctgataatgattgtggttgtgataatggcaatggtagtggcggtgatggtggtgggggtgatggcagtggtagtggtggcggtggcagtggtagtgggggtgatgatggtggtggcagcgatggtgacagtggtagtgaacatgttagtggtagtgatagtgatggtgatggtggtagtgatggtgatggtggtggttgtgataatggtgatggcagcgatggtcatggtggtagtggtggcagtggtggtgatgtggtggtggagatggtgatggtggtggtaatggtgttggtgatgaaagtggtgatggtactggtggtgatagtggtggtggcggtagtggtggtgatggtggtagcgatggtgatagtattggtggtgaacatgttagtgacagtagtgatggtggtggtggtagtggtggtaatggtgatggtggtggtggtgatggtggtggtaatggtgttggtgatgaaagtggtgatggtactggcagtgatggtggtggtggcggtagtggcggtgatggtggtagcgatggtgatagtattggtggtgaacatgttagtgacagtagtagtgatggtggtggtggtagtggtggtaatggtgatggcagtgatgctgatggtggtggtggtgatggtggtaatggtggtggtgatgaaggtggtgatcgtgctggtggtactgatggtgatggtggtggtggtgatgatatggtggtgattgttatgataatggtgatgacggtagtgaagttgatggtggtgatgatggtggtagtggtggtaatggtaatgatggtggtggttgtgataatggtggtgacagtagtgatggtggtggtgatgatgacgatgctggtggtggtggtaatggtgttggtggtggtgaaagtggtagtgaaggtgctagtggttaaaaatctgttgaggagtgagaaacagtcaacagtgcatataacaaattcttaaatcctaaagaacatgactatgccccggctcacttatcctggattttccttatgagccaagtaatttcagttctcatgaatgttcactctactttcccccaacagcactataacattggctcaccagcactcctttcacccacagtgtattatttctaccatggactcctcaaaaatatcggtccccttttacttgtttgtctctgaccacaaacaagtaaaggttatctcaatcttaattcaatcttgaaaatattttctgggagcatttctagatctctactttagctatgctgacctgttctaccagagcaggaatgagattgagggtggtctgtgccataaccacttctgtactctatcttttgagaaactatgacattaaagggagtcacaaagtcacaaagacccatagacaagtttaaaccacagtcaccccaaataattttctgggtctatgtcatcctcccaggcccatctggcccatgttaaatgttgctagtaacaactactctacatggactttacatgaattactgcatttaaaaccccaagaggcattctccctatttacagtggagaaacaagaggctctgaggttaactaacttgtccaagtcccataaccagtaagcgacatcacttagatgtgaagccaggcagtctggcaccagagaccaaattcttagactctgctccactgcctccctggggaactgctcactgacaagctttgacaaatggtaccttcatcctttgttagtaaatgctaggcaaaagggtattaatttacagatcatgcctgtttcagttcattcttccaagatctgctatgcctccttggttgatatgtgtgtgtgtgtgtgtgtgtatatatatatataggctaattttaagaattcttctaaaacctataaaatataactggaatatgcaattcaaatgacacagcactagcagtgaactaatactctagtccctacattttttcaaacagaagatttcagaagctgtaaggtaaacagactcgcccattttaccgattttttagtgtgaattctgcatactgaattccttaagaaatacagaatgccatggtaagttcattttatgacagagctagcacagttgagttgctgcaaactggtattggacactcatcagttttttactgatcatttactgagtcccaactccatttctagttcagtggaacgatgactgtttcaaatctctctcgtaaatatactccagtgggttttcgagagatgacagataaatgacagctttgcatttccaagggttaaatgcttttcctgagggatcctaagtcttggtgccatgagaacaagtgtcaggctctaatggaattgttccatgataaataaactgccaggctgtatgacaagcagctttcagagtctttctatatagtataaacagcagaagttaatttgagtttcttaacaggacctttttcctttacaatataaaagtgccttgggatgaagcaattactctgatttaccatcttctccttggtagaatataaagatgcagcagagcctcacaaaggcagtaacttaaccaaatgagacccacttgcaaagtccctactatgctatttcaaagagctcccttcccggcagcagcacagggccgtcatcaatcacaggtgtctgcgatgagaaggatgctgactctcagggcttttcatgggagagccaataaactatttttcctccaacaaatgctcagttaaatttcattttcactttacagcaccagtttctgaacttcagctcctaggaattttaaaagctatctacacaatgagtcatattttataacatgcttatgttttaaccatgatgcccttccctgcaatccttgctgtggccactcaggctcatgggctggtgcctgaagtcagaagggagaagggtgtctgagtcctctcatccaatccccatacttcaggttggtcagtctcacggacccagaaagcccagagaccctcaacgttagccgtaaaaaaaggctcatgctcttcccgaatccaactcgacttctttttctcccaggactactaaggagataggctgtggttgaaatggggtttctgaaaaggactaagagtcaccttgaactactgctatccattgaactgaatcaacttacctgtgaggtagagaacaagccctaggctagaaagaagataaatggaaccgacttttcaaaaaggaagaattaaaaggagatgtatggccccaaatgcctcatgatagctaatcaccctgacaggccaaccatcacggttctccacggagacaacacaggtggaaaccaacagaataagctcactaatgtacctgagaggaaaggacaccctgtgtgaagagagaatgacctgttttggtacaggcagtttgtcagcttagctggaagtctcagcgggtcaagaggacacagaagagagaagtaagacaataaaaatatcagaatctggaagagaacacagagcagcccctgtggtcaccacaaaagcagaatcgggatgtgaggtcaggggctcggttccgcagtcagcagtggtcagatgcgcctcaatttccctcctccaaccttccctcacctcagtcttcacgccctttcctcctctctggggggagccctttctcctccccaggctaactctcccacctgggctctgaggcctatccccccaaccccaccttcccatagatgccactttctcgtgtttgctcttggtctcaattggcttttttgaatcagcaaataaacctggtcaaggcctctctgtatttagaaaaagagaatgataggccctccctgaccctctttcttgccattacaccttctcttatcagccacagttttctgcaaagctgtctatacttgctgtctctctccaattcctggtttccctaaacatgcaatctggttctcctgttcacggccaggcttcaacttcctcatggggcaatccgtggatgcttttcactcccctatctccccttggctagcactgcccttcagaggtctccttccctggccctctggtaccatgagattgtggtctccctcttgtctctttggctgctcctcagtctgcttgccatttttccctcctgtgacactccaggctctgtgcaaaacctggtctcttctcaagtgacagtctttatgggagatgtcattcattccttgctttcaggtgccatctttatgttgatgttgtacaactctccaagactcactcaaatctctcttctcagctaccaattatccaactccctatgtggccttctcaagtcaggtttctcatagacagcctgcatgtccagacttagctcaccaccacaccgaccccaaccccagcctctacttgttgcctgtgtcagcagaccgcagcactacccacctagttgcctgagtcagaaacctgggcatcatctggactgtgtgatttcccatgccccccatatccaatcaaccctctctagacctgtcaactctactacctgaagactgctcatacttgtccaactctctccttctgcactgccaactccttggcccaggccaccatgggctcccttccagccccctgcagagcctcctaaaatgtatctcccggctgctcttcctaccccagcccattcgctcctaccccagcccaatcgttcctcccccgtcaagccagggtggtgtttctttaaaaaagagcagtttggtcatgccactgccctgccctcaggatagcatctcaatctggtagccctgctcatctgctcaaggtcagctcccaatcttcccagtttctatgttatggctccttcctgtgccttgaacacctctgctgtccacctgccctcttcctcctgatcctgaaggtctcactttagtgatttttccctcttgggaacattcccagactcccctcaccaaatcccggggccctatataagtcgtacgtagaaccctccactctccccgataatggcacttcttatgctaattatctgaatcctttattaaaccataccataagaagaaagtctacatctagtttctatcaaactgtatcctcagcacatagaagagtgcctggcactctaattcctggtttcctgaaacacgcaacctggttctccttttacacactggcacagagtgggcactgaataaaacagtataagatacattaaaaatatgtggtaaatgaacgtttgtttcatgctttttccttccttttcaaaatttaggctgtatgcatatcaccatttgaacacacagaactaaaccccattcagatcctgagtcctacattttatttatggttatagaatttagtaatagtgggaatcataataacagtaatattgagcaactgcctggtgctggaaagcttgtaaagaaagtttatatttgttattttatttacccctcaacaaacctccttatttatacaaaacacaaacttttaataaaaggatataaatctaaaaatgatacaagatctgtgccataaacattattatgctcattttatagataaaggcctttcatcaatgaaaaaagtggggcttagaaaatttaaacagtttgcaaaagtcacacaataagtattagaatcgggattctaagttgcatggaaactgtggatattaaaaacaatttaagttctaaaaagtttatgcttttcaatttaaaaaatattatttaatgctcattatacacaaagtaccagctacacaggacaaaaaatgtctgtgaccacaacttccacacaagtactgcggaggacatttctgtaacttcctttggtgaaaactctgtagtcaatcaagcttgactcagaggaagacattaagaattatgaattatttgaattccacagttctataattcattctgtgctagtgacactaaagacgattaattctaaatatccatataacaatgtcagaaaaccaaggggtcttcctatagctgtggcatcactcacaagttcccaatttcagttagacacctaatctatcatacaaatattttacttgattccctagaacattaggaatgttatatatcatggggctgcctaagcatgataattatcacaaatctttaagaaatgttgcaaagaggacatgaagtctactctaacaatgtgtttgtttcctcttaccttaaaatgtttccctttttttcttttcctcccttccccacttttttttcgggggagacagagtctcactctatccccccggctggagtgcagtggtgtgatctcggctcactgtgacctccgccttccgggttcaagagattctcatgtctcagcctcccaagtagctgggattacaggcatgcgccaccatgcctggccaattttttttatttttagtagagatggggttttgccatgttagccaggctggtcttgaactcctgaccacaagtgatccgcctgccttggcctcccaaagtgctaagattacaggcatgagccactgcgcctggccctgtctctttttatgtttcccatatacacccacatacaacacagcaagtccaatgccacaggcaatacaggcagctagctctgtgatatggagataaatttattaatgtgaagagagcccatgaagacggctcttcttcctcgaaacactgcacagaacaacagacaagctagggtaggtggggttgggcatttagttgtatacacaggaagagatagggggagacacttcacatttctccccatccttgatctctgccaactcaacatcaattagtcctctgccgagttagcaggcctccattctgtgggcctccatctgggtttcccagctgtctgggccctttggggtctccatccactggacttcagagaacacacctctcagcttagctgagaacaagccctggctccccgtaagcactcaattaccatttgtagaatggatggatgaataagtatctggtgttccttctcactgaagccctcccttcactgagccagtaaggataaacaatacgtgagatttgcctggtcttccaggacagttaagcgcatactataatacataaagctgcttcaggtacattctggaagcagcagcctcaaggagtagatcaagctagcttttaccaaattttgtttatgactggcacaaagaaacatggaagtgtcaacattgtccttttggaattaaaattctacatgcattaacagaagatactacataatttctgggaaacatactagaaaattactaaacttgaagatgtcttcaacaagaagcaaatgattccagatcatcttagaattacagaagagggagaaacagcaaggcctcccattaaacaagaagaatacttcctatcactgaacgcatagtttccaaggagccccctctacctccaaagatattaacattgtgccagaaatgagaagattcagctaaggtccaagcagagacaagtcaggactctgtgccttaccccctcatctcaagcagggttaagaaaccaatccatacattgtgatcagtggttggcaatgttaaagtgctctgccaaggtaaaatatcatcaatacctaaatgaaagacgactaacatagccaccattcagaaagaaacactatttctccatctcagacaggtggcctgggtaggctgtcattaaacactgacttcgaaccagcaatagcatatttaggaatatactattcatatttagaatttcactacagaggccgggcacggtggctcatgcctgtaatcccagcactttgggaggccgaggcgggcggatcacgaggtcaggagattgagaccatcctggctaacacggtgaaaccctgactctactaagaacaccaaaaattagccgggcgtggtggcgggcgcctgtagtcccagctactcgggaggctgaggcaggagaatggcgtgaacccgggaggcggagcttgcagtgagccgagatcgcgccactgcactccagcctgggcgacagagcaagactccgtctcaaaaaaaaaaaaaaaaaaaaaaaaagaatttcactacagaattatttataattataaaacaggccgggcagggtggctcatgcttgtaatcccagcactttgggaggctaaggcgggtggatcacctgaggtcgggagttcgagatggatcacctgaggtcaggagttcaagatcagcctgaccaacatggagaaaccccgtctctactaacaaaaaaaatacaaaattagccgggcatggtggcgaacgcctgtaatcccagctactcgggagtctgaggcaggagaattgcctgaacccaggaggcggaggttgcggtgagccaagatcatgccactgcactccagcctgggcaacaagagtgaaactccgtctcaaaaataataataattattattattattataaaacaaaaataattgtaaaaccaatgaaatatccattcttaggagactggttagtaaattatagcacttcgtacaatagaagactgtagacattgcactggatggagtggatttaaatgtatagatatggggaatatccaagatacaaatattaagtgaaaagaataatttgtagaaaagcatggattatataatctcttgtacataaaatgtgtgtgcatttatagacacatgaaaattttaaaatagttatcttgaggtgaaggatagagtggtgaggagtggggaagaatttatattcttctgctttagttgggggttttactgcaaatattactttttaaatacaaagcattatgttttaaaaatatcgacagtgtaagttttaatttgttctttccctttaaactatctataaacatgaaaaatgtaaaattaaggtagtaactatcaaatacagcacaggattatgtgctacactataccaggatcctggctttccctaccaggctaggcctattttcttcattcttcttccttcctaaccaaccccttccttcctcactccccaaaaatgaactagaccattcagtagctctcctatacaccaacagccaccaagcagacagtcaaatcaggaactcaacctcttttacaatagctgcaaaaaaaaagtaaaatacttaggaatatacctaaccaaggaggctaaagacctctacaaggaaaactacaaaacactgctgaaagaaatcacagatgacacaaacaaatggaaacacatcccatgctcatggatgggtagcatcaatattgttaaaatgaccatactgccaaaagcaatttacaaattcaacgcaatccccatcaaaataccaccatcattcttcacagaattagaaaaaaaattctaaaattcatatggaaccaaaaaagagcccacatagccaaagcaagactaagtaaaaagaacaaatctggaggcatcacactacctgatttcaaactatactataaggccgtagtcaccaaaacagcatggtactggtataaaaataggcacatagaccaatggaacagaatagagaacccagaaataaacccaaatacttacagccaactgatcttcaacaaagcaaacaaaaacataaaatggggaaaagacccccttttcaacaagtggtgctgggataactggctagccagatgtaggagaatgaaactggatcctcatctctcgccttatacaaaaatcaactcaagatggattaaggacttaaatctaagacctgaaactataaaaattctagaagacaacattggaaaaacccttctagacattggcttaggcaaggatttcatgaacaagaacccaaaagcaaatgcaataaaaacagtgataaacagctgggacttaattaaactaaagagcttttgcacggcaaaaggaacagtcggcacagtaaacagacaacccacagagtgggagaaaatcttcacagtctatacatctgacaaaggattaatatctagaatctacaacaaacaaacaaatcagtgagaaaaaaacaaacaatcccataaaaaagtgggctaaggacatgaatagacaattctcaaaagatgttatacaaatggccaacaaacatatgaaaaaatgctcaacatcactaatgatcagggaaatgcaaatcaaaaccacaatgtgatgctaccttactcctgcaagaatggccataatcaaaaaatcaaaaaacagtagatgttggcatggatgtggtgatcagggaacacttccacactgctggtaggaatgtaaactggtacagccactatagaaaacagtgtggagattccttaaataactaaaagtagagctactatttgatcctgcaatcccactactgggtatctacccagaggaaaagaagtcgttatacgaaaaagatacttgcacatgcatgtttatagcagcacaattcacaactgcaaaatcgtggaaccaacccaaatgtccatcaatcaacaagtggataaagaaactgtgattgatatatataaataaatatatatataaatatatatatatataatggaatactactcagccataaaaaggaatgaattaacgacatttgcagtgacctggataagactggggattattgttctaagtgaagtaactcaggaatggaaaatcaaacaccatatgttctcacagatatgtgggagctaagctgtgaggacaaaaaggcataagaatgatacaatggactttggggacttggggggaagggtgggagggtggcaagggataaaagactacaaatagggtactgtgtatactgctcaggtgatgagtacacaaaatctcacaaatcaccactaaagaactgactcatgtaaccaaacaccacctgtaccccaataacctatggaaaaataaaaacaaataaacagagaaaaaaagtgaactagaccaatgtttccacaaacctatcctataggctttaatcccaaccaaactccaggttgattaaggacattccaagtctcaaagtaattcctctgtactcaggcaggcgaaaaacaaaaacaagctcactgtatctattctgatagcacctaatttgcatctgctccagaataatggtggtctctgataaataagctgcattattccccaggatacctcagaagatagcaggtcttctgacaccaggcctgggggcttctctttataaactcaacttgtctccttccaagagatacaggacctccagactgaacttgcagactgaacttgggtaccaaggcttctagaactttttaatttatagatagataacaatttacggaactgccaaggccttccaggaagtctgaattctactctcctggctacagatttactaaccgtctattcctcttccttattcatccccctaaccacatctctcctacctttaaaatttcatcagtactcttctcagtttttgcataaaactgtatcctttactcctatctagttaaactttgctgtttgataaacaagttattatttcttcccaagtaagtatgtaataaaattagaactttagataaaaatgtgttccctgttcacaaatatttacattttaagcagtttttttctgactagtatttaccagtcttacatagcaaggaaatcatcattaataaatgtaacaccatttcttaatattaatgttaagcatattatattttcttaaacattaaaggttgttaactaatagtatctcattactttactatgaaaacattggtaattctgcaaattcactgtccatttacaatccatgtgaattattttagcaggcacattaaattcacaaaagaatgataaatatctgaaaactgcatatcctcattaatcatcaaggaaatacaaaccaaatcaaggtgaaaccatttttacctgcaaagttgaaacagtttttttcaattagttggaaaggtaatattcaataccagtgacagtggtattaggtgacagtggtgtctcccaggcagcttgaggaagtgtaaatcagaagaaacttcctaaaaacaattttgtattttgtagaacattttcagaatctttaaaaagaacactttacttcgataatgtcctcctaggaatctgaccaaagaaaactgtcagaaatgctcagatttatgtgtatgaatttccatcagagaattgtatgtaagaggggcaaactagaagaaacctaacatgtaataatcagaaaataattaaaacattatgtagctattaatactcatgtacctcaataatatttaatgacacaggaaaggctcataatgtaatgttaaatgggaaaaatcacataataatataaaatgtttacattatataaatggatagtgtgcatatacatatatatatgaatatatccataaaataaaatctaaaagaccactaagatgttaacagtggctattcttgagacacagaagaaataaaattttatttttccattttctgttcttactatttttgaatgttttatattaaacatttattattccttatacctattaggatggctactctcaaaaaacagaaaataacaagcattggtgaggatgtggagatattgcaaagaaacccttgagcactgctgatggaaatacaaagtgggcacaactactgtgcaaaacagcatgggaggttcctcaaaaaattaaaagtagaattataatatgattcaataatcctccttctgggtatatatccaaaagaactgagagcggggtcttggagagatatctacacccccacgtccacagcagcataacgcacagtaaccaagagggggaaacaactcaagcgtttatcagtggatgaacagatttttaaagtgtgcacactcatagaatggaatattattcaaccttaagaagaaagaaaatcctaatatgtggtcaatgtgacaggctgaactatgtcccctcaaaagccatatgttgaagccctaacctccagtatctactgtatttggagacagggtccctaaagaggtgtttaagttaaaattgggtcattagggtgggccctaacccaatctgactggtgtccttataagaggaggaaactgagacagacatagaggggcaacagggatgcttgggcagaggagaaaggtcacatgaaaaggcagcaagaggccatctgcagccagggacagaggcctcagagaaaactggccaccaccttgatcatggaattccagcctccagaatggtgagaagataagtttctgctgtctaagccacccggtcggtggcattttgtgagggcatccctagcaactaacgcatacaacacggatgggccttcaggatatgatgctgagtgaaataagccagtcacaaagagataaatgctgtgtgattccactggcaagaggaacctagggtagtcaaattcattgagacagaaagtagaaggacggccactaggggatgcagggagtgggaaaacagcatttgttgtttaatagatataatttcagttttgcaaaatgaagagagattggttgcacaacaatatgaatgtgcttaacgctactgaactatatacttaaaagtaactggttgggcacagtggctcatgcctgtaatctgagaactttgggagaccaaggcaggtagactgcttgagcctgggagtttcagaccagcctgagcaacatggcgaaacgctgactctactaaaaatacagaataattagccaggcatggtggtatgtgcctgtagtcccagctactcagtaggctgaggtgggaagatcacctgagcctgagtggtcgaggctgcagtgagctgagatcatgccactgcacgccatcctgggcgagagagcaagactgtctcaaaataataataataataataataataataataatgataagatgataaacttcttgttatatatatttaccacaattttttaaaagtagacttgagccttaaaaattgtttcacaatgatacatgttgacacatttcattaatatttcagataaaacaccatgtaattttcctcactagctatcagtagcaaaatgacagtattctagaagtttacctcaattttacaataagatttgtcattagggagttgcaaaataaaacaacgagataccgctacacacctattgtgatggctaaaatccaaaaagctaatgtacagcttttgggaaagatgcagagctggctggaatataagcagctggatatggcggcttaggaagatagtttggcaagttcttagaaactaaacatagtcccaccatgcaatccagcaatcaagctcctagatatctacccaattaatctgaaaatgtacgtccatataaaaatctacatgcaaatgtttatagagatttattcataatcaccaaaatctgaaagcaatcaagatgcacttcaatagatgaaccattggtggtatatccataatggaatattattcagcaatgaaaagaaatgaggtatcaagtcacaaaaatacacagatgaatcctaaatgcatattgttaaatgaaagaggccaccctgtaaagctacatattggatgattccaattatacgacatgctgagaaaagctaaatatagagtagtttccaggttggggacaggaaggtagagaaggttgaatgtagagtacaggagattttttagggcagtgaaactattctgtatgatactgtaatgatgaatacaagaaattaagcattggtcaaaattcatagaactttataaacacaaagagtaaaccttaaatctcattcaggagattagggaaatcccaggaagaaaagcagaatgagattatacatatgcattttaaatgtattttaaaaacctcacttaacagtatgaggaaataaaatcctgacccaaataataactttagaaataagtggagtctgtaaaaaaaagacaaaaggaacttcatataaatatcatactctagttgataaagctgtttcccgatggaagtacaggatgataatgctgaaactgctatacatgcatactggaattaaagatgtaagtaaatagatggtgaataatggaaccaagatttctcaatgttgaagtgggtgggattacacatatgcaacggaaggaagttagaatgatccatgtgataaatggattagagctggagacatcaggatgaactcagtagcatatgtattagcttactatagatatagagggttacatatagaaatgtatacatacacacagagagattagtatacacacatgtatttccttgccctgtagctgagtgaccctacacccagtagcaatgagtacacctagcatcctgatcttcatttctaatagaaccagggccacttggaaaaatggctgattctaggactggggcaaaaaatatacaaaataggtctgaggcaccttgtagtgcagaaagcaagaaaatgctcacaacaacaataacacaataatgggtatgtatcaaagggttacaggaggcaattgaaagagtttccagtggctaaagccagagtaatttgagcaacacaataaagtagtattggcttatcacctgaagtataaaacaaatatccatgagtccacacggtaaataaataaatggggaatagctgaatcacccatgtggaagaattccaaataatttatgtagatattccaagcttaaggaggtgaagcatagcgctgcactctttaagaattacagctatatgcaacaacatcaatctcacaaacataatattgagtgttacatattgaaagtatgtcatattgaaagaagcaacacagagaagaatacctactatataactctgtgtctataatgtaccaaacaagtagacttatagtcttggaattcagcatatagttacctctagagaaaagggaaagggtaatgattagaagtatgcctgagagaggccaggtatggtggctcacgcctgtaatcctagcactttgggtgggacaaggcaggtggattacgaggtcaggagatcaagaccatcccagccaacatggtgaaaccccgtctctactaaaaatacaaaacaaattagccaggtgtggtggcgggcacctgtagtcccagctactcaggaggctgaggcaggaaaatcacttgaacccaggaggcggaggctgcagtgagccgagactgcgccactgcactacagcctgggcaacagagtgagactctgtctcaaaaaaaaaaaaagtatgcccaagagagattctgggattctagctgtgctctgttaaacttgatcactgatctaagttctgtcgaagttctcaaagttataaccaattcaatgaattgtgtacctcacactgtatacaaaccaacttcagttcagaaaaagaaaatatgaacttaattttgatgtaatgaagatatctagtacaatttttttcacatggtgatccaattgacccactaatggttaaacagatcattattttcccactgctccgcggtgccaatttttgtcaaaagttatgtcttcatatatgcttggttctgttcctggactgacttttcaattccatgtgtatatttgcctatccctgcatcaacactgtgtgtcttaattactataaatttatagcttacttatctacctatttactataagtaataagaaaaattatttattataagtaatgagtaattaccataagtagtaagtaataattactatagatttaagtcttgatgtcagtagagtaagtccaacaaccttattctttttcaagattggcttgttatgccttatcctctgtacttttcatacatgttttggaatcagcttgccaatttccacatacaattttgtacacaactgttggaaactagtttgggagcaagtacgtcacatccttgcatatgccatacccatatttccttccttgccaaatctggaagcatggagatggagtttctctttgcctgagtccctgagtgaggccaatgttgcaaagagccttcacccccatcaacacattacaaacatacagggttagcaagaaataaacctcattattaaaaaaaattaaattatatggccctaaaactttaggtaagaggaagcattaaaagagaaagatttgagattaactgtggatttattttaaatatctgagctatgataagcttatatgcacacatacactcataaacacaaatgtgggatacgtgaatcgttacttctatatgaaacatctgagttacttgcaactctctgaaattaactcaaaccatttaccagatggtaaattctggagataaatttaaaatatgcaaaacaatgctatctgacatttctatgaaacacagagtacctaattgtaacttaacattttaattttgggaagaggaaacaatatagaatttttatttctaatattagctttgaatgataatcaattctgatttgcaaaacggtctatgttttgttaacaaatcagcatttcccacttgctgtttttattggacaataaaagccatatgggctaagaattcatcacgattaataaaaaagatgcaaattcttataatacaatgttccacataactttataagaacctctgcaacagcttttgtgtatatcaaattaaaatttactatataataaaattatgtagtaataattttcaacctctaactaaagtcatatgattcttcaacatttatccactgctacaccacagtacataaatcatgcaggctaattctcacaatacatattatatagggcacagaattattttgatttaattctcaataagaaccgaagcagtaacttgttattttagactggcaaatcaatagcaaatgcttgttctaagattggttatcactccagtcatgcaagtagcttaaaaactgacatattagcattgacaaaaggattgctctatttgttttccaaaggctttcccgcatgactctatacttagttttatgccaaagaaaatcaatctctttattcaacttgtcaatcagaaaacacatgtagaaacaattattttattgcaacacataaaagtacactgaatcatataggatgaaatagaaataaaatgccaaagtattaacatgcctgtaaacagaattaagacttaaatgcaaaaataaaattaaatatagaaattaaacctaaaggataaaaatcagttgaatagacttactccaatcctcagttttcaaatacaccaatctcttttcatttcagaattttaaaaactcattagaaggactagcttcttccaacacaatggaagtccataaaaacctaattttccctttttttttttaatctgcaaaaactaagctttctagacagatgataatgctggcacatttatatcagaatatcaatgaagaaaacatttctctttacaacaaggattttgagtgattctaaattacactttacataacaaagaaccaagaaatacagatgcctggcttttgatctagtgcctataaaaagagccccagaaaggtctacatggaataccaaggtagaaagcaacataatacacaagatctaatgatcacctaagttcccccggttccatcaaggtcactcaagttcacatgcatgaagtattcaatgtcattcacattaactgcctcatgtaaattttcctttgttttaatggatgagtattgtagggcctggttgtaaaatatgaagtctgacctaggaaaggagtcaaatctttgtcccagtgtccattcccctggggatcctcatgtccccagacttcagctccctgtatcctcaaggccaccaaggaggcagcacaccacttcacaccaccacatcataaacaatacacctgtccaaccatggctctctctgctatggctacaatcaactgcctccatttaaattttagtctctgggcacctgtggaatcacacagatgcacaaagtggcacatgctttgaagacgctcaggccaagacataacctcactttacaccaactctgtcaaaacaaggctgcttatgaagcatatttcactcaagtattagcatcctacatggagccttttattatgctaaagaaatcgtcactgacttagacaacacttgtccctatccaagaatactgttggtgtgcaaggagcttccaagggtgaatagatcacatttactcaacaggagtaagcagacatcccaatgatgaacaaaaatgattgctgcagactatgatgactaaggaagaccatcaaattcttatagctgaagcaacctactaacttttttgatcagccttagcgaagaagcacatgggagcagacaccacaaagtatggtgtagcagaaagagcattacttggagtccacaatacgggctttatttccagctctgccttttagtttacttaagcatttgaagagcaaaaaccttcttttcatctatatatcctcagtacctagcagtgtttgcaaaactgtgaaccctcgatgagtatttgttcaatgaaagaacaagagaatatataggatgtatgtgatcttaagcacttaacatctttgggtttaagtttccaaatctttaaaaatggggacatagtaaggcaatgcatgccttttacactgggttgctgaaagaaccaagcaaactagcagatatgaaagttatctgttaatcataaagtctgttacaatagtacactgcaagtaaagaagcattctttgaattgggggtggtggaagcaatgaggctacttcaaggaatatggccttgaaaagcccagatttctcctctgtcccttgaatcctttaatctacctcttggcttaaaagggtgttcaactcactgagagagaaaattgatatggttctaatcaaaaccaaaaatgtgtgccaagttctgaaaaatacagtgctaaaaaaaaaaaaaaaaaaaaaaaaaacaactttctcaaagtctttcctggcaacagtcaccctcatgaatttccccactaacacaatggcaccaccctgctcacaatgtgccagccctttcccagccaccccaggtccttctacttaataatcctagcattgcccacacgttaccctagcacccattagtatcctaccaacttttctaaaacctaacttcatataattacaaatccatgaagaaaagtgggcgcttcaatcaacttacttttagatttcagaataacaggtaaaatatttgggaaaaaatacattttattcctaccttgcatttaaaaaaatgaattccaataaattaaagaataattatttttaaatgaagccattaaaaaacaagaaagaaaggcaggggctggcatttcttaatcattaaagcaatgagagagaatgtaaaaaaaatggacatatttgatcatgcaatcatatacacataaccacaaagttacaaaattaaagataaactaggaaaaagatatgtgacatataagagaaggggcagtagtctcatgatatatataaagagctcttacaaatgaaaatggttgaaaatcagagaaatatgagttgggacatgaggtgggggtgaagagggagagaaagtagtcaaacaagtacaaaagcagcagcctactccaaacagaaaaaaaaaaaaagaaaagaaaaaaacaaaaacaaataaggaaataccatttttacctaccaaataggcaaagaactaaaaagtgtaaccctcaataacctacagacagctgtgcagagcggcaggaggtctcatgcgctcctggtgacagccaaacaggtaaaatccttctggagggaaacttggcaatatatcaaaagcgttctgaaagctcacgtcctctaatcagtaattctattgttaaaaactgttactaagaaaattaacagcaatgtgtgcaatgatttctgcacaagaatgttcaccatagcacatgttcatgtaacagccaaaatattagaagaaaaaaatctcaaggtccaagaataaacaagttatggtatatttatgtaatgtagtttacaaatgtgttttcaagaaaaatatggtatttaataatagatgtttacaatactagtgaaaatgtaagattcaaaactatacagggtatgatctgaacatgtgtgaaaggcccaaataggaatacacatattttatacatacatgtatggggggtatatttatttcatatatatttatttatttatatataaatatatatttatattttatatattatttatatataaatatatatttatattttatatattatttatatataaatatatatttatattttatatattatttatatataaatatatatttatattttatatattatttatatataaatatatatttatattttatatattatttatatataaatatatatttatattttatatattatttatatataaatatatatttatattttatatattatttatatataaatatatatttatattttatatattatatatttatatattatatatatttatattaatttgtgtataatatatattattaaatataataaatatatttatttttatatattatataaaaatatataatatataaaatatataaaaattaatctatatctatttacaaataaacatatataatatataaatatatgtgggtgtgtatatatatatatcagcgagaaggtcaaggacagtagtctcaacttcaaccttgagtgtttttgtgtttttaattttgttttggaattattggatttggatctctgcagactctgaaatgacgatgggtaaaagaaaacttttcaaggtcaattattatttcaaattagaaaactctaggctttatttctttgtacctgggaagtcctcatcaagccattaagggaagaggagagggtgaagacactgcagccatcagtcccctgcaatgaagtctaagacagaaggatctgcaggagacgcccaaggacacctcagctgggctggcacatctaagccccgcccgcttccccaccactctaagcgctaaagtcgctgtctggtcttactcccgcagattaaaaccacatgagccacctggaccccaaccccattcactttgggattccagccttccagcaacaatcaagttgtcttatattttcctcaaattaaaaaaaaaaaagggctcatttataaaaaagagaagggctgctctgatcaaaaagtgttttacagaaagacaaagagtaaacaatctcaaccattttgtgagctaataacacaaagagagctttgattttatttctcatatattttataaacacaggagagggtgggtaaaagacatcatgtggcttgcagttgaggggacagaggctgggcacgggtccaaaatctccccatgatgttacctgtgacacatacatgcacaaaaagtctgccacataacgaagcatttaaataatttaatttgtatctaagggtcatgggactatgcagcatatttattttcttcttcttcttcttttttttttttttagacagagcctcgctcttgttgcccaggctggagtgcaatggcgttatctcagctcactgcaacctccgccaccgggttcaagcgattctcctgcctcagcctcccaagtagctgggattacaggtgcccacgaccacgcccggctaattttttgtatttttagtagagacggggtttcaccatgttggccaggctggtcttgaactcctgacatcaggtgatccacctgccttggcctcccaaagtgctgagactacaggtgtgacccaccatgcccagcctattttcttctttatagtttttctacttttgaatttttctgaaattaattgttttacttttataatgagaaaaaggtcagcagtgtctaaaatttttgtagttaagtgaaataccaacttcactatatctctttcatcctcaaaaatctacaatggcttccccaatagctatcttatcgaattcacagtccttcaagtgttttctaccagacctgatgtccagaattttggcataacataaaaggtccccttgggcagcgcacagtggctctggcctatagactcagggctttaggagacctagacaggaggattgcttgagcctaggtggtcgagatcaacctgggcaacacagtgagaccccatctttacaaaaattaaaaaactagccaggtgtggtggcttgtgcctctagtgtctgctacttgcgaggctgaggcaagaagatcacttgagcccaggagtcaaggctgcaatgagctatgatggcaccactgcactctagcctggaaggcaaagggagaactcctctctaaaaaaaaacaaaaaggccctcccccatggccaatgacctagcctgtctcccttattagctctacccgttaatcttctgcgtgggtccatattcttgatgtccgggctggctccctaatgggtcatgttcctttacatccatatgccttcgctcactttctaactttgtttgaacttcctcttctccccaccacatcccacttactggctggctctggtgaaagttcccctcctcttggaaacagtccctgaggtgattgcctgtcgcttcctccttgttccaggcaccttgtgctcacattcagtacagactaattttccattgttctctctaggacaggaactcctctttgctgtccccagcacagagctcaatgactagcctcagtggataaatgtctgtcaaattgtgttttcatcttaatcattctttcttataaatttccaatgcagattcactacctcagccttgcaatcatctgcctcagcattaagaaggactgcaaaacccagtaacagcatgtgccatgcttcctcactggaatttcatcaacctaaatgacccatacctttgcccccttttcacgaccctccacgctcttgtcacaagaagcctcccctcccagtgttattaagtaatatgacgattattgcttacaacctaccctgttagactgcaatctccttcatgaaagaaaatgtgacatattatctggaattccatctctcctgagtccctatacagtgttccacccaaagaaagacctccaacccaatgactgcagcactactttgctccaggaaagagttccaaccagctgagatacaattattttactaatttggccaatatacatcattgagtttcaaacattccaaatgttcctggagaccatcctcttctcagttaagaggcagagggaaaacaagatcatgaatcccttttctaatcatgagcaataagagaaacaaaaatgtcctggttttatcagttacatcagaggaccaccatgaatccctgatgagagcaggatgttgaaggagcgaccagggctgatgtcaggtcgcctgcctatgagagcaaggcagaaccagggctctggcacacctgctttgttcccctgctaccgacaggcttgctatttctttcaaagattttctcatggaccatcacaagtgaaagcagtgttagaaaacagcttcagggcttggggaggcagcgttgttttagactggctggaaagtcatgctgagcagcaagaggacagatctcttttagaggagacagccccacctggctgcaccctccaaggaggccacagggcatatcatccaggtgggtcaggtggcactggggctcacagtcaagccatcatcaggttactgcctctgtttcatcactgtgaaagttaagccatgatccaggtctctgggtcttcctgagcaagtcaatgcagagccaaagcctgtgcacaaatgaataacctcacaaggatgagagctgtgtgtgattgatggctctacacaaaccatctcagcaaaggagttcagtaagagccttgtgagcatatgacactctccagctctactaaagtgatagatgggttcacacggaagctactaaatgggcctcattgcaaaggcatggcttcaaccatagctggacttcagggagcacagtgttttcaacatataccttggaaaattcctcactcataagtaaagattacatatgcaggggcccagtgaatgcttgcctaaaagacagtgtaatgctaagcaaaatagtctgttaataggaaaagaaatatcatgattttaattctggagtgctaagtcgcctaatcttcaatgttctgtgttcagatgacaggcaggaagctgagctagagtttatgcttgtccaattaatcaaataacctccatgccacttatccttggaactggcattagaaaagcccccacgtgcccccaaatcatataaatttcacagtttcctagtcattaaatccaggttggcctaatgctgacgtgtcatattttgacatgtagccacaggggatatacagtcaaaattaagaggagaccctgagctaaaactggcatgccctactcggaggaacaatttatgcccacacatagataaaactgcatgtatcttctccaaatgatgaatattaaactgttagaaacatagggagatataattcattgactcattttgcataaaacatttcttttagctttcaaccaaacatatagaagggatatttgcatcatcacaagtacacaggctattattacatgtaattacatgcagactttcaatactactatcacaatggtatttattgaataaacctgcagcattaataaaatcatattttccctggctttaaaccctacatggcttccccatgcacttactataaacgtttatccaacccctcacatcgcctccaaggctctctgagcccatctctaccacccccacaccatcccaacctctccagcccccggcccggccccaccatcactcattctgccctgccacactggccttcttcctttgttctttgtctcttgaacaagctaagagaaaggcccttgtccccgctgttttctttgtttgaaaggctttctcccgaaacctccgtgcagtagttaactctccgatctcaggtcaaatgtcaccccacagagggccctccgcagccaccccagcgagtgctgcctttcacctgcaatcaccattatgcgccccgcactcacttcattttctctagagcataagtatattccaatctgaaatatattgttttttttctgattatccggaccacaaatatataagctccaataagaaagtagtttgcttccactacagggtctagaactgtgtctgacacacaatagatccaccacaagcatttgttacacagatgaatgctgtgctagaaggtggataaagcaagttacagacatggcagcctacccactgggtgctaatgattgagaaacaagtggacaaatagccaagaaacacagaaaaaaaaatttagcagctgcatacttaattatgattaagtaatcaaagttagttgaacatatcaaacgtgaataaattattaagtcaagacatgtcatatggaaatgctaatgacctaggctgggaaagctctctgaggtttgagaatgaggaactttatgaagtttctaacatggtccctgctatggcacctaactgcctagaacatcagagttgcttaataaatactgctgaattttgcaattcttaaactaagaaaatgttaaaatattattttagctttcttagtgaatatttttaaagaccacttgtctataattcgtactgatgtttttctcggcataaataccagatatatgagtatgaaacttaaatagtagaaaaatcatccatggatgcaggtaagacacaacccagaagaatttttttttttttaaacacagagaatttttttttagcctgacaaatttcaaagaggctttgcaagtgcaaacagacttcagctttttcacattcctatgcccagaaactgggacgtgaaaatgccaggaaccctttcaataactagactatgtgatagatgcaggagaaactctccaaccaccaagattactcctatggagctgccaaagaaccagatgcttccttcaaaagcatatcaatttggcggtgaaaaaccctgtggcctcagctccagtcgggaagggcaggtgggatggcatggtgcaggatgcctgttcccacttgcctcagcaaccatcttcttctgacagcaaaactgtgttactcccaggcttgaaggcatgagcaaaatacatggctttgctatatataaggacgggacttggaaatatttggtctgaggccatgcaaaatgaattccatacatggggagactgtaatatcgaaaaagatgaaaatagtttcactgcacttgaaatttttatcttcaaagaaattgaacatagatgaaggaaaaaatagctgcatttaaaaaaaaagtttcataatgcaggacgttagaaaataaaactttttttaaccaatacatataacaaagagcaattgtttttatgactgccatctaccaaaccatcaactgtgaaatctttctctttaatcacgagtttttaaaggctctattcatgtgcatccattttcacaaactcttgtgaaactagcatgacctggcttgaaataataaacccaaagggtttctgttgtagttgttgttgaggcattagtgtttttatttttttaagaaagccaggacttcatttctgcatatgaagctcctcgtggtgttcatcctcacttaaatttgcagccaaaattattttttcagtctctttaaccctggtgggccccctgagagcatgtgtgttctgggcttttgtaattaggcagcttgcacctgagcgtctccatctctagtaattagagctcaccgcggcagtttccttcccagccgatctggccatggggccaggaatgaacacatggaggagtgatgagggtggtgtgcggctgtcttgacctcttctgcaccttaccctacttcaggatggcagggttctcagttacaccaggggtgcctgaaaggcaggacccgcatcctccattctaccctctcagcaccgagcaggatcccctctcgtggaaaacagctcaccccgtgtattcatgcacagctatgtattttgagggaagtggctctttctgttttcatctgtcactgtccactaagatacaaataaagagaaaacctctgcatctctaaatgaaaacactgaacgtattcagaatagctccgtttcacaacccccttccatctatctacccaagtcatagagtgcaatgaacctcaatgtctttttttcaagctgtttttcattctaaacacctaagttgactttcctgtcccactgcagtagccaacagctaaaaataaaatgaatttccctgggcaatatatagaaaggcatactctctcacttttttccttcgtgggctagacagatgcttgctggttcacttgccaataatgatcgacctggcactcgactgagccttcaaaacactaaacatatcaaaggccccaggttaacctctgagatttactttggagtaattaataggtttatagtccttaaaataatctatggatgtgccaaagaaaactgtacaacagtactgtccgtttagaggccccatcaaacatgggggatgtctgatggggcctcgaaatggacagtactatttctaaacctgggggatactccacagcagcctcgctgtccagcaagtcagaccatcacgtcaagcagacatgaagagagagatgggaacaagctagggggatgtggacaagacggcaatctgctttgggaagaagagcatcagcccacagcatcttttttaatctttccaacagaggctccaaagcacctcctcagcccaaccagcctccctgatgaaactcagggctgtggctggtcaggaagagaaatgaaaggaaggggagggggactggccatggcaacagaggtggggaaggggaggagggtgaggagctggccgttttccttatcaagtggtcagtggtagagaagacggtgaggtcactcagaagacaactgagctagggagcagctgagtgccgcagttactacccgccagcaacagtcgcatgttcaccggcgctcttttcttctcgttctgcctctaagaggcacagaaaacagacaagcaactgcagactaatgtacttcttaataagaacagcagctcccgtgactgcgttctcaccctatgtcagatactctgctaagaactgccttatgtcttcccctttaaggctatcaatgaatatttattattttaagtgagggctttcaaaaatacagttgatccttcaacaacatggattttaaaaactgcatgggtccacttattgtaggttttttttttttttgataaaagttacagcaaatgtgcctgcctctcctgcctccctttcccctccctccacctttcccacctctgccagtcctgagacagcaagcccaacccttcttcttcctcttcagccagtatactccacaggaagatggaaagaatgaagacctttatgatgacccacttccacttaatgaatagtaaacatattttctcttgcttatggttttcttaataacattttcttttctctagcttattgtaagaataatatctatcatatattaacagtacatataatacatgtaacatacaaaatgcatgttaatcaactgtttatgttatcagtaggggttccagtcaacattaagctattcatagttgagcctttgggaagtcaaaagttatatgtgaatttttgactgcatgagggttggcacctctaaccccagagctgttcaagggtcaacagcacacactcctgagttccaagaatagtctaccacttgctgatcacatgatctaaggcaagtaactcaaccttcaaaagaaaacctttcttgatctgtaaaacaggaataacagaattaacaatgcatgtaaggcatgtacttagctggtgcagacaatgattctgataacagctaatgtttacattatcctatacctactctatagtgctcacacacaaacagaatgaggcacaagagaggcccagtaatgtgtccagccccacagctagtcagcggtaacatcaggattccaacctataagtctggtaccagagtccatgttcttaaaccattaatctacgatgcctctcaagtaaatagtcaataagtggtaggtgtgaggctgtaggaaaaagaggagacgaagggacaggaaagcagtcctcattggaaaactaggtttcgactggcactgttggactgggctgcagtttaggtcctcccactgctgagttccctcacttcatctcctggtgcttctggtttcccatttataaaatgcaagggaaggattctatttatgtcacaaggtgcatctaaggagtaaaaagtcacgtcatgtttgaccaatgttagtcagatcaagatttattttagataaattatctgttagttttaattaccatgactcagtttttatgttcactttttggtcaaagctaaataaaatatataaatatataaaatctgggctccaaccagactcccacacactctcagccaggcatcttgagcaggtaccgtccctcttgtccaatggctgtgtaaaagtgagggcaggaatccgccttgacaaagaaagttcaaccgtctaaactcagtggatttgaaactatttcagaataggatttctcagaatgaaaacaaatctatgactcctcttaacagccaaaaaaaaaaaaatcttgaaataatgactttaagagtaagactttaaaaatacagatctacactttccactgtaacagccactaaccacatatggcatttaaatgtaaattaattaaaattaagttaaatgctaagctcagtttcttggtcccgacggccacgtggagccaatggcacccgtgctggatggctcggatctagggcctctccaccgtcgctgaaggcgctcttgagcagtgctgagccacatgctacgtggacaagtcaattttcctttaacatgtgcccaatgtactttatttaaaacactgaacttcttataatatttgtcactcctacattattccattatttatgtagtccttccctttgttccttggctctgtcatagtggtgacagaaggtgaatgcaattactgatttacttttctatctccccaaggagacggtgagttccagaactcggtaaatgctgagtcttacaattctcaaaggcacaacacagaccccgtccttattacattaccatcctacaccacgaggataaactccagacaatctgaatacaacttgaaaacatttttaattactcaaaaaataatccgtagtatatattctcaacaatttttttaaacaagatacagttggagtgattaaaatcttgagttaaaaaaagtcagcgattagctctaagccaatgtttaggcaatgcagtaatgcttaagttctttattcaaccattagtatactgatgaaattctctgtaaggagtaaaacatcatgtcctctgtgacaaattaagctacaaagctgtttcctctgttctctgctttctagcttgtattaactagtgccataaaagaaagcctttaagataatatttatttgcagaaacaaacactgattcaaggcacttagaagcacatatgtgcaatgaggggaacacttgagggaatcctaatattttatcatgtcctggatattactgccgttgtacctgcatatctccatactcatcccactctcgatatttcatgtcaagctctactcccaaccaaagacgttctggtgttatacctgcagattacccacaataatggcaccagtaaatatcacgtctcaccctttgtcagaactgtctaagattacataaacatgacatattttaagaaggaatgcatccctgttgtttacaatgtaacaaagataatgccgtgacaaatatcctaagctataaataaagacatttaccattgtactgcacttactcatctctgggttgaacaaatgttaattatagagaatttgaaaatgggacttgttaatgccatttttaatttagcatgttacagtgtaaatgttttccattgtgttaatttacacctgttatcacaagcttcattattaggtttatagtggagcagctctccgtgactctgaaatttgcttaaaatggcagaaacaattactaattagaagggcatgtttactttaattatatttatttcctagtctagttttacatgtaatgtactatggaagtgtatgatttaattagtgaaacccatttatgaagagcaatttctcaaatgagtactgcttacaaaatacaacagattctttcagtgtttcgtaaattccttgggtgatatttctacagagagatatccacatggaaatctttcactcatgagttcagagcatttcccgtttttgttccaaatactgcaataattaccagtaacaagaattcagctctagaaatttttaatgcaaatcttaatatatggtgtgcaaaatgtagaaatgtatgagtataatctttaaaaatctataaccaaaattaacatgggatttctttattgatgttcacgctcacaaatttcaaatcctattttatcaaatcctactgacagtcacactcacaaatttaaaaatcccaccttaatatataaaaagcaaattcggttttttaaaataaaaaagacatggcttttttcctctctgaagtcatttctctggcttccaaagcacaactgccttttgtttttgtcaaatattgaggcacagtaactaccaatgaaataaccaattcaggcaaagatcattctgcgaaagactacggggaatgggatattcacctggtctcaaaagatcaccccacaggctccttaatcacaaaaggaagaaagaaccttatagcacagagaaatctggtggccacagccttattcatgtgaccatacatcccaccaaagggatagtgtgacaccgtgtacttcctgtggtgccacaggggaaggccactctgtcttgatgggatattctcgcatcttataggaggaaacaattggaactgggggacattccgcaagacctagcctggacttttcaagatgctacatgtcacaaaagactttgaaaaagctggaagactattatagattcaaaatgaggctaatgagatgtgacaactaaacataatgtgtgatctctggctagatttcggactttagaaaataacggccataagaaaaattactaagacaattaaggaaatctgaatataaactgtgcactagatattattatattcaggttaaagtgtcctgagttacactagaaatgtttagggattaactgtagtgacctcaaagagtctttcaaatgttcagaaaacaaagtgagagctatcaagagaatgtggcagaatggctagtgaatgtgggtgatgagtattcgcccatctccatgacaccattttttaaacttttctatatacttgaaattttaaaaaatcacagttgggaaaatataaataatccaatgggcagagtgggaggtcaaactaggagtactcctcatacaacatcttacaccccaaacttcaagaaacattactgccctattctgaatgtaagctttctagcattaatgttaaacccattaaaatggcagttactcggccaggcgtagtggctcacgcctgtaatcccagcactttgagaggctgaggtggacaaaccacgaggtcaggagttcaagaccagcctggccaacatggtgaaaccctgtctctactaaaaatacaaaaattagccaggcatggtggcatgcgcctgtagtcccagctacttaggaggctgagacaagagaattgcttgaaccaggggtgagccgagatcacaccactgcactccagcctgggtgacagagcaagacttcatctcgggggggaaaaaaaggcagttatgcttgcaaatggcttcacggttgtctctcaaaatatttagtcacaacattcccatgaagcacattcttcacattgtcacataaacattcttatgttttattttactttttatttttgggatagggtcttgctctgtcacccaggctagagtgcagtggcacgatcatagctcactgaagtcttgatcatagctcactgccgtcttgcagttcaagactcctggatcgaatattcttgtttttagatcccagaaagaatccatgccacagagcagccaagatgtttcttgtataaagactcatgcatcttgccagcttaggtgagagttcctgtacttgctgtctagaaaagatgtaactgcagagtgtgtttcaattttaagatccttactataaggtccactacacagcactgtgcacaagtgtgcaaaaacacactttcttaaaggaaagtaaacgtcagtgcacgtaggattttgtctgaccgagagaaatccccaagcaccctaaagggcagatcattaccccctcatctcccagcagtccctgcttcacatttccacactgcccctgcagatgcagatgggcttgactgatgcaccaatttccatgcaggagctgatgctgacaacctcttctggggatgctgctattgactaatgtggagtaacagccaacaagggaacagtcccgcggaaagaagacctgccagaagaatgccacattccaggttccctgtctcccatcctctcctacccagacagagaaactgcccaacatgctctccgctaatccttgtgactgacacaaagctttccagcaacctatgtcgtttttagaaatgctggggaagttatttacaagagtcctgatttctccccacggcaaagcccatttcttccacctcaaatagtcattcaggtagtcttctttaaatgtggttatcctgccggttagggcagacatcaagcccctttgtttaaatgcgcacccactcccaccccagccctggatgaaacccctggggtagaccagccctaataagggaggtaaaaagtattttgaaagagagctggagaatacgagctgagcccacgcaacggctcccaggaagatgtcgaggggcttccatgaagaactagttaaggcgggagctgatctgcagataaatcagcagctcagcagctttcaactcagtcttcaaacatactgctcttgcaatgttctgaggctgaaaatagatattctgtctccagaaaaggaagaattaggatgaggccaagcttgttaggagaaacaagagaagctggtattgaacctgattagacaggagcatcttgctagtcccctttcccaagctgtaaaaagttaagatgaaaaaaaccagcatggctcacatttcttatctactgttaatatagagtttaaattaaaactcagggggtctctacatggacagatgacttgtaagtgtccgcctctgtgtgttcacagatgtacaacatacactgtgtgtgtgtgtttcaagaagggacagcccagataaagggaggttactgaagcaggctaagtttcagcaaaatgtaaccttcaccttagaaaccaggaaccagagtaattagattacaatctttccaacactatgggagagatttgatcaattaaagccaagatcagttacattatttggtttacctaagtaatggacccttaaatgcaatcaatacttctctaggctgtgagtcttcaagacctgagatgcattcaaaaaacacaaatggattttcaaagggcctcgggatgttcatcacaggctgaggaggaggactgcagagggtggggggcagaaggaaacagacaacagacctgagcttgctgtatgaagtcttcatttccttccctcactgatgtgctgctttcatgttcattttgtagttcatgtatgaattaaatttgttttaccaaagaaccttaatctagggatgagcagccatgtcactcaattcattttaaaattgcagcattaaaactcatttaataggataaagaatacgattaagatttctatttgtgtttctgaaaatccacaaaacttacattgggaagttacgaagaaaaaggcagaagtagctctagatcttctacctcgtcccccatgccatcccttccacaacatggatttagggaaggacaatgacccagtatgcttgggacccagggccatgacccagtatgcttgggacctacctggagctgaccatatcctgccttctagaactaccctggcttagagtggatccataacagtcccgtgttaacagcaaactttcacaccacctatactccttgtccccactctatgtgcagggtctgtctccagtcctcccttacccagacagaggaactgctccacaggaacccaggaaatgctcctgggtttagagattgtgattcaacttggtgggtccatttgccaaatcatactgttttaaagcctaaaaataatgtatctgtatgtccagatagaacactgcccaggccactctcagtccattcactaatgaggactcctgcaggggcagggcaggacagggcgctgcacctgctcacatttcctccagccgccttccccagtacgagcttgagcatgcgcacctgcaacatgtgaggctcttatcagtgattttgtttaacacacttgtaataattagaaagtgaagcaactaattcctgacttccccaagagcagggcttctgttaaaaggtgtggggaaatgtgacaagaggggaagtggagagggggaaattgatcctgagagtttactctgcatagctttgaagtctctgcagtaatgatgaagacaagctaaggtaatctaaaacaacaggtaatcaaaaagtcatttatgtttaccttttatcatcaattatcttcctcttggcagcagttgaaaaattatgttttactcaaaagtcaggctgttgactttatttatacaacacttgaactgtgttgggtgtcagcgtgttagccactgtggaatttcaaattctgctgtttgacagtacccgagagttgactctgagagtggtcttctaataactgtattcttggttcctaaaatgagatgttttagctcagtgccaagagtgtgaaaacacatgggggcattacattagaaacctgggacctgtcaattaatatcattttcctccaacatgaagaaaatacatccagagctcagtcttctcatttatggaatggggataataatgtgtagcttgcctttcatagttgtcttttagaccaggaaagataatgtataagaagcacctagaatcatctttgacatggggtgggagcacagcctattatgatgagacatatccctgaaaaagagtccctttgagtgtcttcgtctttccggctgaatcatctgctgattcaagaagaggaggccatatgcagacagcacaaagggaactcccccatggagcttcagatggtagccctgcactcacttaattattcacgccagcatgaaatctgcctgacatccctcttcctcatcctcttgacagcaacagcattaaaggattaagtagtatttggggctctgaaggggcctgaagagtgtttgtgtacaaaaggaagagctcacaatccaagtacataagacagcggacatcacttgggtttacattgacctcctctgtatctaggcaatggtctcttcaaaatcaagcaccacacccccaatggctgcagttctccatcctggttaaggcctctccttctgaggaatgacttcttccatttaacagtcagtctaaccctgagggctggagagggccacagaggtcattaacacaacctctacacctgctgaacagtgtggcaggaagaacatagggctgtggagtgagaagacctaataacccaagagctaccttggccactgaccaagtgggggcaccttgggaaagttacatcctctgagactctgttttctcatccacaggatgaggaagttgcattagatggattttctgtgtcatcttgcttgggccatggggtgccacacatttagtcaaacattattctggctgtttctggatagaagtaacatttcaatctgagtaaagcaggttgccctccctaacatgggtaggccccagacaattggctgaaagccagaacagaatcaaaaggcagacccctcctagatataagggggaatctctttctgcttgactgccttgagcctgcgacatcagtttttccctgcctttggactcaaaatgaaacactgggttttcctaggtcttaagtctgccagcctttgaactggaactcacaccactggctctcctgcatctccagcatgctgagtcattctgcagatcttggaacttgttgacctccataatcacataagccaattccttatcctaaggatttacgtgtattgttttccatccatcctattggttctatttccctggaaaatcctaatacaatccccaaagatgaactttcatttctaacccctaccaaatggccatctgatccacttgtacacctcttagagacaagactgcactgctccctgtggcacctcaccctgctctaagggcagtggaggtcagcctcttgggaagcactaccccaggtgactccaaagctgaaccagccacattcccacccacaaagagtgtttctccaacaggtgtgatttgacctgagcagatacagtagaaattttatccctgctttcactgtaattatgtcaatgtaggctgagattgccttggttgttattgttgggttttatctcgttttgggtttcctggttatcacatactgttcgttggctcatattgagtctgcagttaacccttaactcattttcacatccatttcactgggtgtggccaaatcaccacctgacacttctgaaagagacttttagtacatagggaaggcctttatattttttactataccaacatcatcttgttaccttagggccagaatttttgcagttcttaccctgtcatctaaagaaccatgtccacctctccctctgtgtcatccagagattggattgcacagtacatcattaaccctcataggaaacaggagatggcacacacgcccttgctgcactccccactagcaccctccctcctggccagtggtctccagctctgacttcacattacaatcacctagaaatcttaaaaaaaaaaaaaaaagaaaagaaaagaaaagaaagaaaaatgccaggctcaacctctgattctgatttagttggaggggctgaggaggaaagatgcttgggcattagtaagaatgctttaggtgattctaatgtacagcaggctgagaaccagtgttctgtctaggccagagatcagcaaactttgtctgttaaagagccagaaagcaaatattataggctttgcgggccaaatggtctctaaagcaactgctcagctctgctactgtagcacgaaagcagccttaaacaatacataataaacaaatgggcacaactgtgttccaatacaactttatttataaaaacaagcaacaggccattttgccccagaagctatttcattagttgatcaatctgttcatcacccagttttaaaatagttgtgggcccagcacagtggctcacacctgtaatcccagagctttcagagtcggagaaggaaggactgcttgaggccaggagatcaaggttacaatgagctatgatcatgcactccagcctgggcaacagagtaagaccctgtcacttagaacaaaaaaaaaaatcgctgtctctctctcacacacacacacacacacacacacacacacacacacacacactggttatggcagcaaatataaactcatcaaactgtattatcacgctagtcacatctctccatcttgtctgtgacaccagagactctcaaagtggctggctgaaatcaatattcactctctatccggcattcccttcatgtatcagacgaatgatcccatctaaacaagaaaaagacttgttcttagaggatcctttctgtctcccattactcactgctgccttattatatgttcacaaacgtctgcttaatattgcttctagaattcctcagaaactgacttaagctcacccatctgtagtttccaaaccatgctttcccccttgaaagctgggacatgtttgtcaaaatcatttacaatcttctggcatcctattctccttgattcacaaaatattatctaaagtggttccacaatcacatctgcaagttccttccgtgcccaggaggcgtaaaggcatttttttagtcattctcattatctcttctatcttgggttttaatgtctcctaaccatgtttattctaccctttccaacttaaagatcatttttcctgataaagatgataaaatcaaaatagaagttgagcagttctgttttgtccatgtcatttgtttactctataccatctgttctaaataaggctatgtccttttttgtggggagtgctccaaatagtattgttttaaaactcttatatacaggcaaccacactttctggttcacctcaggcactctggtatatactgtctgccctggggtaaatacgaatagaggcctctttactctgaaaagtgtctggttttttgaacagctggttcaataagtaaagctgaagaaatggtaaagcactccacagggttcatgggctctcaggtcttccacacattcaagaaaaagagaaaactatttctgttgaaaactttggccacactgggccaggcatggtcacacctgtaatcccagaactttgggaagccaagacgggtggatcacctgagatcaggagttcgagaccagcgtggccaacacggtgaaactctgtctcaaccaaaaatacaaaaattagccaggcatggtggcgggcgcctgtaatcccagctactcaggaggctgaggcaggagaatcactggaactcgggaggcagaggttgcagtgagctgagatcacgccactgcacaccagcctgggcaacagagcaagactctgtctcaaaaaaaaaaaaaaaaaaaaaaaactctagccacactggattcatatcctaggcctgccacttactagttctatgaccacaggataagttacccaatctctttaactctcagctcaactcactggaatctctgtgcctatttaatactaaatgcatgattaaagcacatagcatttacacatatcacatgataaatgctcaagaccaattatcattgccaatattactatcagtgttattaactccctcaacccctccacagcaacatggtatctgtgactctctattggtgcagtttgtccttccttttcagaatgtcacatcttgttttctcaccaatctcttgctactggtttaaactcaatgctacctccccacaatctcgtaaagtctttctcatcttgacaaagaaatctttgtcttcactagaaatctggaatactccaaggaagtttcttctctggcaaagaagcaaccagcatttataacaaacataatttgtgagctgctctggaaagaaatgcaaacgtgtattccatgaatccctcagcaactgtctttcctggaatcaagataaactattattcttcatggttcccttgggaacacactctgaaaacttaggagactgcaactctcaaatagcttgagtaaatcaccctagctagaaaataaaatgacattaactttctgagaaaaggactgacccaaggcatattcaaataggggaatcataaaagggaccacacaggagaaaaatgagtgatagctacagttttagtatcaactacaaaaacagtaaccatttactgagtaactaagatatgccaagaaatggcataccaggcattttataaacatgatttcatggattcttctcaacaattttgctggaaattgaggctcagaggaagcacttgcccaagggacataactagtaaatggcaggtacagcacttaccacgggtcttctgcactctaagttcaagctctttcagacataccatgctacgtgtatttttttactgaaggtgctccaaactagtttttgagacagttaaaaataaaaggacatcatgaaaaaagcaaaaataatatttacatacattttagaaaaaaaaatatataaacattgttggttaagtggatagcagacctttaattagcaattttgaatgatgaaacagccacataggtgcaatgcttctggccagggcagctcattagggactcagtatccgaagtctttctttttttttggatggctagccatgtatacacactgtatagcctctaccaaaattacataccacttagcacgaatgcaagagatcccttcctcgtactataaacaaaaattaactcaaaatagatcatgaacctaaatgtaagagacaaaactataaaactcttagaaaatataggccttgattagcaaaaccttcttagatatgacacgaaaagtacaagtataaaaaagttttcatcaaaattaaaaccattatcaagaaattgaaaagatacacacagaatgggagaaaatatctgtaaatcatgtatctgataagggacttgtacctgaaatatacactgaattcttacaactcaataataaaaagaaaacctattttaaaatgagcaaacattcttggccaggtgcaatggctcatgcatgtaatcccagcactttgggaggccaagggaggtggatcacttgaggtcaggagttcaagaccagcctggccaacatggtgaaaccccatctctattaaaaatacaaaaattagccaggcttggtggtgggtgcctgtaatctcagctacttgggaggctgaggcaggagaatagcttgaacctgggaggcagagcctacagtgaaccaagatcgtgccactgcactccagcctgggcaacagaagtgagactctgtctccaaaaaaaaaaaaaaaaaaaaaaaaagcaatggatctcaatagacatttctctaaagaagataaatgaatggcaaataagcacaggaaaaggtgttcaacatctttagtctttaaggaaatgcaaatcaaaaccacaatgagacaccaccacacatgtagcattgggatgcctatatcaaaaagacacataattaaaaagtcttagtgaggctgtggagaaactggaaccttcatacaccactagtgggagtttactggtagggtcgtaaagatattctaaaattatggtgatggctgcacaactctgtaaatatactaaagccattgaattgtacactttatatagatgaggtgtatggtatgtgaattatatctgaatatagccagcgtggttgttgttttaaagaaaatggtatgtcctcatttcttccaaatccaaggcaagttagcaaaggcataatgagaaaaagaggtctaattttcattcagaggccacatcagtgctccatctggacaaagagtcagccaagaagccaactgccaggagtggaagatgaccacttccaggatctggcagagagactttgcaagtgcctttgaaagaggacaatgaaaatgtatctggcatgaaacacagcaggatccaaagaacaggctttgatattgccagtcatgatgcgtgtctttaagatcacagataacgttctgtgtaacaacaaacacaaaatgcctatgactaagtgtatccttctgatccactcgtgtgcagttagagaacacccaaggggtcccacacacacacgtgaaggggacactcccaacccatgagggaaacacaccctccatcctcctttggttcaaccccagcctccgagaacaggtaatttcataggagcttgctcagctctgtgttatccacaaacttgtcacctttatagtcacttgaagaagttggaaaaatacagtgaaagtcctggtgctacaacagagatgtagcctatgccagataagctttacatgtgttacctcattagtcactcaacacagggtgatcatcttacaggaagagatactgaggcacaggaatgtcaacttgcctaaggtcacaaagctagaaggaacaaaatagggcttcaaacccagtcattttggctccaaaggctatgccttaaccactgtgctaagcgccgcctgcttaaccgggctaccttttccaccacaatttctcatcccttctgaaagatggtcacaggtgttgctgaaatacaggtaacactatagatatatatcagctctctgagctattagataaatgatttaaatatttatttttatttaaaaatatttaaaaattctacttaaatagaattttaaatagttttacatttaggggtacaaaaactttacaaagatagtgcagagaacccttgtatacccctcaccccctggatacccctcacttggtttattctgttgttaccattgacattactacgtacatctgtcacaatgagggaggcaacactggtatgatactattgactacacgctacactttctttggatttcacaacttttttccccttaatgtccttttctgtcccaagatcccatcccactacgtttagagctcatggctcctttgcctggcctggtcagtgacactttgctcagacttcccttgttttcgatgacgttgatggtcttgaggaacactgccaggcatttggtaaaatatccctcaatgtaggtttgactgatgcttttctcactcatcactagacccagattatgggtttttcaggtcacagagatgaaacatccttctcaccacatcctgtcaaggtgtgacatagtcgatgtgaactgatcactgggatgagaaactgtttgccaggtttctccacctctaagttactttctttccttgccctagtgtgatgtttgaagctaagtcccaaagtgcagcccatgctgtaggaatgaggagttaagctccatctccttaatggggagtaactatataaatataaccttatttttaatgatggttaatccgtatggcattaaaaaaaataaaacaacatgccaagtgacagtgtacggcccttccctattgttgctgactctgcagtggctgtaatggcttcctgatcatctttatgtctcagaatcacaggaggtaagaagcactatctccaaggtgacaaaaaagtaaaacaactggccagcatggaaagagggaagtccattccattctagatgatgtttaacaaacaacaggagtcagagaaaggagaaaaaactatcccatgatggaggcaacacatgctgcatgtttgtatgggcaggtattaaactggaagtttcaagtaagtttccaagcaatgacagatataaatttccaaagtgaggtgccaggctctccaaaggagcttttcaaagttaatgtgtcataactagattcatgattttttataccccgacctactctgagtgagaaacagaagtcaacagagaattttgtttttctttgagggggaaaaaaagagctgtgctgtgatcccctccaccatcaccaaagagatgggtagcacagtggagggggggggggtgccgactctcaagtccactgacagaggcttcaaagcagaaatgcacagcacttgatataatttccgtagaattttggaggcctgctggactggcagctggtacacagctaaaagatagaggctagctaaaattgcactgggaaggacctgaactgcattctccctctgaagtggaggaaaggcaccttaatttgggaagccagatgtagaatttatgatggggatgtcgaccaaggtcatcctgcccaagagatttcttccagggggtcagatggacccagcagggtctggatgaggcagatctcataaaatcagaagctgcgagcaatgtgggagcaagggaaggcaaggctgccagagtaaggtggctgcagttggaggggcccagcagaggagcacacggagtgcccatgtggaaggccctttaaaaccagctcaggcttccagaagtatggcagactaatactcttgttgttttactgtctaccagtaatgaatgaatgaaaaccaattattattgttttgttgggttcagaggaaatgaaaaaaaaatgtctacaggggcaaaaaggaaaaggaacaaacagtaacaaccaaaaatccctgggcagtgagcctcagaaaaggggaacggtcctgtgaggacatgtggtgatctcacgtgatctctgggaggctgggcctcagctctgtggctgggtgggggaactaaactaaaattccggggttacatggcagcatctggaaggcaatggaattgtctcaggaccgcagtacccccgcaggacagcagcaccctatgactactggcaaaagcaaaagcaaatactctgagaaaagcatccttgacttaggccccaagactttttctacaattaggatcaaccaaatatgagctagcaattaaggtttactaaacagacagggaaacgaaacatcaggagtgagagaaagaacagatgcaaagtgccaaggacttcagatgcttcagttaccaaatactgactataaaataactacatatgaaaggctaaagaagtaaaagacataatcacaaaaataaataagtaacaagtgactatcaaaaatgaccaggcagggctgggtgcagtggctcacgaccgtaatcccaccactttgggaggccaaggcgggtggatcacctgagtccaggagttcaggaccagcctggccaacatggtgaaaccccgtctctactaaaaatacaaaaattagccaggcgtggtggcacttgcctgtaatcccaggtactcgggaggctgaggcaggagaatcacttgaacctgggaggcggaggtttcagtaagccaagatcgcgccactgcattccagcctgggcaacaatgagcgaaactccatctcaaaaaaaaaaaaaaaaaaaaatgaccaggcagtttcagctttgcaaactgaaaagagctgtggagattggctgcataacaacgtgaatgtacttaatattaactgaactgcgtacacttaaaaatagcgaagatggtgaattttatgctatgtgtattttaccacaattttttaaatgacaaggaagattttaaaagaactaaaactttttaaaataaaaactatgattattgaaataaaaaaatttgctagcaagattatacagcatttagtcaaagctaaaaatagaattagtgaattggaaggaagaaatgaaaaaattacctaaaaggcaatacagtaagacaaggaaatgaaaaatataaagaaatgttaacctaaatggagaatacaatgagaaggtccaaaatatgtctcatcggagacctagaagaaaagaatagaaaggaaggaggaaagggaatatttaaggagatgataactgagatgtttccaggagtgttaaaagacataaatccacagatatactaatcagggtaaatgaaaagaaattcaggctgggcgcggtggctcacaccttaaaccccagaactttgggaggctgaggcgggtggatcacctgaggtcaggagttcaagaccatcctgaccaacatggagaaaccccatatctactaaaaatacaaacttagccgggcatggtggcatgcacctgtaatcccagctactcgggaggctgaggcagaagaatcacttgaacccgggaggcggaggttgcagtgagccgagatcgtgccactgcactccagcctgggcaacaagaacaaaactccgtctcaaaaaaaaaagaaaagaaaagaaaagaaaagaaaagaaaagaaattcaatctaggtgattgtcataaaactgataaacaacaatgataaagaaaagagatgttaaattgcaacaaggcccagaaaacacaaagccagcatatgaccagacccagtgagaaatcccttctatttcttactatcacctacccctcctctactccttttctccccagcattcactcaatgagaaagagtagctggagcgggtggggagagtatcaatatgacactaaacctacctcctcccacataatctggatggatgcctacagccatgtcttcaatgggcaaggaaagtcttactttcgcataagtgaaatttctgaagttctcattaacatattaatattcttgactgaatatctgaattgctactaaattaagatggtgtgttttcaacttaacacaactgtccaatgtaggaagaaagagagacatgtgagttagccttcctcaacaaaaagcttgtgataaattcctgttacctatgcattgcaagttgcagaagaaaccaagtctatctctcaccatttgctttcccagggtcaaaaaccacaatcatcttgataaacaaggcctatgcaaatacaaaaatacatcgtcatgcagcgataatttcaatgcctgcactcacctccatcccatttctaatatgcaacgtattaactgccaactcattgtgaaaagcatctacgctgttctcttttttataaattctatagattcattatgattagatactctccatatacatcagctagccagaaaaggggaggagataatgaataatacccaagggaaggaaaatccctttttcagctggtttaagtcatgccgataatgtgcacacagcactatgcatttaccataaagcttttcaattagttcatagacaagttaaccttctaactcccagaaaatataattcacgcacattttataccacacagcatcctgctagctattatccatcatttacaagtgttatttgtctataaaaatgacactaaagttttgaaaaacgaggctgctctgccttcttctggctgtgttttaacaaatggtatcaatgcaaaaggcttataaaaagtcatataaaaagcaattagtcaaaagagcaataaatttttttaaaaggatataaatgactgcctgtctagatagccaaatgtctgaaggctgatacacaatgaaataagggttaacataaaagagtacacttcattatttattgttaataaagttaatcaaattcagttcttcttacgcatgcatttaaacagaaacacaagtacgatatgcatatttatagaaaacagccctaaagatcattatctctaaaagaaaatccagcaaaaagagatgcataaaatgtagctgttacccttttacaacataaactgttttgcttaaaacacaaacatttattttaagtaaaactattaaactaaataatattttccacaactgacaaccatgactaaaacatgaattctaggattaacattaaaataattttgggacagagggaaacagaacccttccatttttcttttgctggtatcttatccacctacactagttttgttcttccactcaaaaatctattctcaaaagatatattagaatctttttaaaacaaaattagataagcataagctcatcaatcagcaatttctaaatgcattatcttcaagtagtttggtcttttatgtcacttatctgcttaaaattaagtataaaagagtttccaagaaaagaagatataaaattaacttcatttcataataagttctccaatcatgccagcagacagctgacattattacagctcacacttataaatcagtgattatatacactagttaagcaagaaaagaaatgaagaaggcaattatatagtggtgaaattcccaagaagcacatttgtagtcaatgttgctaaacagtagttcactcgtggttaaaataaaagccccctccccctgccagatatttttggggttgtgagttttgaggggaagaaagtagaaactctatgcaatttgttttacaaataaattaaaaagccagcaagaaatcaatgaactgtaattttaactcattttactgtttactttggagctgaattctaaaacttccatatgacattaagctataaaatagtactgaatcaaacggagagtagaatactttggaggaaggggtggtatctgaatatctatagacatttggtaatgaacgagccagtgacgaatgaagacacagggaactgagctgagcttggtttccacaccctcttctgttccctgccacttgaataagagccaaaatgccacttctaatcttattttccatttcttaaatgtgttttattaactcctcttttattgcaaagctaaatattctaattggcacattatagacatacagctactagatgtcaattacactttaatgtgtttgtaatgctctgcagcagtgaggttctggcagacccagtgaggtcccatttatttcttcacttgtaataatggcatgataatacaacctgagtagtgcatcagaacacagtagttagcatcactgcaagagaaacactctcttccatcttagttatattgctttgaagaaatcagatatcctttctactcattcaaaaggagaaccgaacaatgctgattattcctgaaggaccttttgattttcaaagcatttgctagtaatctgttaattaatccacgcagcccctccgcaaggaaaactagaggagaactgcgcaatactgtactaacattttagagacaacaacaggaggggacagatatttggagaacctgacaaaagtctgagagcttctacaaacacaacctgcagaaaatgtcacttgattcatatcttcaactccagggttatgccctgaaggaaatgcactcatgatgatgtgaactgcaattcgtggacttgtatcttcatctaaaccatcttacccataattcattcccccttacctagcacactttaagatctgttcatgcttccacatagttaaaaaaaaaaaaaaaaaggtggggggagggtgtagttcaaaagacagacagataatcctaaacccctttcgtcccaggacttagaaagcttattttttccagtccaatatacagccaaaggaaggagcaggataatctacaagggaaagtgcctcttatctgtttccttcctgagaacaaatggaccaagcatacagatgtgagtgtacacatgtgtgcacacatgtgcccctctcaaagtgcatctgaagtaaattaaaagaatcctttctgagtgatcagtctgttccctgaaaggtcagaattttctggtaaatattttttataactccaccctgtctaaacagcaacaacgacaacaaaaattttagctaaaagcatgcttgaagaagagtctaaattccattgataagccaatagtggcattaataataatggcaattaataatgcacactagcatgatgttgttttctgtagcacatttttctagatatcttaagactctcggtagcccatatttttatcatccctctccatgaggtagggcaagggtacttattatccctatttcacaagagaactatgtcctagaaaattaaaagacttgtctaagctctaaactggtaacaaggcagagacatgaatttgggtctccaaactctctgctaactaaataatggcccagaagacatacaaaagtcaacacaaacagagtgccagctgttatttacactgcctacaataaatgtttgttccagaaaaaatagttcaaacaagatgagaaatagtttaaacacaaaaggctgaagggttcaatataggagaaaaaatatgtttgcttttaatacagtggaggaactgttcaggaacagtttgttcttctgtaaaggctggccttgttgtactgccgaaggccgcaagatcacaagctacgtggaattgagacgccagctcgcttcggcacaaccaacttctctcttaatgctctaagttcctgtcttcttcatagctttgacctgaaccatgaatgatctttttgacaaacaaaatttaaatgtgtgttataaacagggagcaagtgtcctaattttgatacagggtgctaagaaatacagaaaacaaaggaaattaactgggagatccagggaggctaagaaacaatctgccactgggagaaacagccatagcttctgatgagctaggaagattttgtggttgatatcacagctgtttgttgaggctgtggtgggatttctttttcaagagggtgaagggagatttgaacttggcgcctgacacaattatcctaaagtaggaaagcctcagttggaagaggatgagtttctttaaatagcccaaaggctgtgatgcgtaaaaaaggacttgacttattctggatagctccagagggcaaaactagcaagtggccagcaggaacacacatactcagagtagagcagagcttgctaataattaggactgcctcatccatagcaaggaacactcagaggctcatctcctctgaactacttccagctgggactcccgacgcccaccatcaaggatgctgggagggaaatcccacattagtaaagatgatggacaagataaacgctaggactctttcaactgttaggatttgagggtgattttcaaggtccccatgacagtcacttccagactatgaggtggagagtcacacagaactgagtcccaacctcagttctatcactttgggtatttttttctccttagatggtaaccaaaccttgtattttttaagttttctttgaagttcaggggtacatgtgcaggtctgttatacagtaaacttgtatcatgggggtgtgttgaacagattatcttgtcacccaggtgttaagcctagtactctctagttattttttttttatcctctccctcctcccaacctccaccctccaacaggccactaaaagaacaagatcatgccctttgcaggaacatggatggatttctatcattttttttaactgtgtgatactgagtggctctgccacccaagtgtgacctccaaatcaaggtgtttattagaatcaaatggggaaactacttaactctaaagataatcagatctataccccagaacttcaaaatcttaccctccagaggggggtccaggaatgtccattttttcccatgagttgctagcagtccaattttggaaaccaccaataaacatttttagcctatgaattcatttgtaaaataggaaacatgatagtttttgcctaaatgagtcatggagatatttaaataacacgtaaaatacctagtatgatgcctctacctagaaaacagtcatagtccctttaaaaaacattttctgcaatatatgatcaagcttaagagcattcactgattaaaaatgaggacagaatggcttacatagagttaatgtttagccatctcctattttcttgcctgttttttaatcctgtcttgttcttcaagcaacacaaaatcagaaagaaatttgatacgatataacttgaatcagtttaatcaaatgccttatctatgtgaataatgccttaaaattaatgtatcatcaacacgcatttaaaagttgaatgcagtaatagaaagcctatgattttttgctcttttataataatcagaagctccagatataaactcctcactcaaaaaagtttaaaattcatacatatctccccattctcaggtaaagataaaagatcccatgtctcttctcctctgtatcacgcagttacactcactcctttaaaatcctgcaaggtattgaagtggaagaatcatcctgtcctgacatttatatctctacaaatggcttcagttctttaattgtgaagttgcttctacacattagggtgagtgttaagatactcccagacagaaaggaagagggaaggtaattggagtaatttgtatcaagtgaaaaaagtgtctcctggatttctgtattcctagttgcaagttattagactgtttctgtttgggtggttttataaaaaaaaaaactgtaaaacgtggttgcgtaagcacatctaaaggttaaactccaagcagctaatctgcatgtgagaacaagtaactgtcaaacatttaaccttttgcagattaaaaccgtctgactaacagatgtgaaaccatcgttgctataattgttagaagtagaaatctgagcatttttagaagatacaacactttttggagcagtcatgtttatgctccaggtcaactttcctgttcatgactgagatgcaatcatagcctttcatttattttcacactgtgattctcctgaattattatacgatgttcatagtttattctacagacatgctcttagaaagttataagttgaattctaatcgtcagttatatttgcacaccgtttcatacatgataattttttttccattaaaacacttagttttcttaacagtacatgataattttaggaaggcattagcttcatttccaactgatccaaactggccatggctcctgaagattctctcttcccttccatttctctacgctcatttctgtcacataattacaagtgtcagctcatggtagatgctcaaccaagatctgttgaatgaagtaattatctttaacacctaaaagatctactccctgaagacatttttttcacgaaagcctttttttgtattgcaaattgccatctctagtgaacttgcgtgataatttttaattttaataaatgagatttttcttataataggatatattgtttctggttttcagtattaaaattgctgataggaatgaacattttgtaatatataaaaggacgtgacagaataatactgtagctaaatacttatccagcacagtgtagatactcaaatatttgtttaaaattactctacatttcagaagttgtggcattaaaacatttgacttgaaacacactgcaatttaatgctacatttcttcttgtcaaccagggtctaacagtatatgacctgtttctaagaagaaatagaatgtatgcaaaagcttttaattctggaaatgtcatcatatacaatagagaaaaaaatttaaaataaaaatgtctaatactagaagaaatctgagatatcttttacacgaaagtataaaagtgacaggaggggttcaagtctccgaattctgagctttttatgtgaatagcatataaaacatgaattgtgaaatatacagtagaccatctgtgagtaagatgactccatgatgccatacttgacaaacacggacttagatctgaaaaacacacaaagcaagcatccactttacccacgaaacacgtcgggagagaggaagtgtggttctgtgaggcccctggtctgtagaaagaaaccaccacgctctggctcctgcctgaagctgcacaaatgagctggctcagtattagtgtcttcttttaaaggttagcacctttaaattgctggcatggcgattggtgggagctagaaggggtacccctaaaaattcttcgagcaaaaccgtaaataccaaattacgacataaaggggctgctactttctttacaaaacctcggctgtggcttgtttctcctccgtgaatcaactgtctttttccaacaaagacacccacttcagggtttcaagggatatctattcaaggcacgtactgtacagcatatgtggttatctacaggtagtacagcctgtaaacctagtttgctcaactaaatagcatttatcatgtatttttatgccttctgacatctgctactaaatacaaacaatgaaagcatctccaaaaactagagatttctactctaggagatgtggtggctggtaaaatcacctgcactttaaccatggaacaagacatttcccctccccatgtccagcccatgcccagactgtcctctaaatcaggggtccccaacccccagaccataacagtccatggcctgttaggaactgggccgcacagcaggaggtgagtggagggtgagtgagcctgagctccacctcctgtcagatcaccggcggcattagattctcataggagagtaaaccctattgtgaactgtgcatgcgaggaatctgggttgtgctctctttatgaaaatctaactaatgcctgaggatatgaggtggtacagtttcatcctgaaaccatccccaccctcacctcctcgtccatggaacaactgtcttccacgaaaccggtccctggtgccaaaaaggttggggattactgctttaaatgaacccttggcctttaagggcacatgctgcacacctggagctggacccatggagagctgatcctgagttgggctggggcaggcttgctggccgggctataccatgagctagctgcctgtcctactggtaaagcctgcaaccccagagaaagtgcccatttcagaccaagaagggaggtgctcacaacaaacggaaacatctctgcagtcacaccaagagctgcacccttgttcctcatgtgtattaagtgcaggattaatgccatgaatgctaggaatccaccatatcacaaacactgacctgttgggtcaaccagtttccaaaataacctcattgctgtttcttctcgtttgtattttatctttgccttttcaccttcatttccctctttcctgccatcccttttaccttaactgagttctttgtttcctatttctgtccccatattaaatgacttggctagttcactcgttgattaaaatacgaagaagttattgttggaatgagacattgttcactgcaatgtcttttttcgatggagaacaagataaaggccaacgctgtgagtgtcaatgttgaggacaggttccctaacttcagcctcagaggatcttcccatgctgtagtctaacatgctgttacaggttgaattgtgtccctgcagaccccacaatattcagatgctgacatcctaatctccaatgcttcagaatgtgactttatttgaaaatgaggttgttgcagacctagttaagatgaggtcactctggagtagggtgggcaccacaaccctgtgtgactggtgtcctcatgaaaaggggacacgtggacacaggcatgcacacaggcagaatgcccagaaaacatgaaggtgtcgggtgatacatccacaagccaaagaacgccaaagatcaccagcatccaccagaagctggagaggcatgaagggattctccctcaccaccctcagagggaaccagccttgccaacaccttcctctcagccttccagcccccaggactgccaggtgacacacacctgctgttgaggctgtccaggctgtgggactttatagggcagcttcatcaaattaatacatatgccatgcattttctctgtctaccctgaaattcaacaaaatgtgttatttggtcaaataaaatgaaacacagagcaccaaataactaagacactaacctctttctcaaataaaggcaagttcatatatcatagtcagaagttaaaaattaaaagaacaattgtcgttgtctataatctaaaggttgctgtcaagggcttttcagatgacctcttcataggaatcctgtttattctttgcctgtgaaaattttgtgttgcacctaagtttaaaattgtaaataaggaacctaatgtgcaaaatgcaacactttacttcatccatgactttacggacctgaataagagactaatgaaatgagaaattgttaaattacaaaaaacaagaacacgtgatctgtataatagggtactataaacacagtcatatcagaggaactaatctctcacaagtcagaaggagactgagtagaaaactgcgaacgaccaccacccctggtcccttgttgtaactcagccacggacccaatgctgaatcgctgcaagccttggtttccttgtgtgcatccgtcaggtgtctcaggcaaggctgcccgctccactgtctcccgatctaacggagctcaatgactttgctgcgttttactctgctgacccctcactccttggaatttcccacttcctgagctcctggacttttctgcctcctggccctcctcctgctctgttcctcctccacctgtccaaagtattcctcagtaccctcttgttcttgccactctctgtgttctcccaaagggagctggtccgctatttccctgcctgcatgtccaaccctgacctctcgcctaccaagagcagtctctaggacagcagctatgttaataatcatgataatatgcttgcacttacgtatatttatactgtgctgaacactacgattttacagtggatccatacagtatgaagcaataaggtgacttaaaaaatggtttgttaatagattagtttctttaaaaaggtcaacatatcccagcactgtttacagaattctttggtttaacaagggcttttatctcattttacttggtgaaaagttaaagcccagtttgtctctgaattctaaattagacggtacacaataggcaaagtgctttcaattgcatccaaggtgaggatgtgcaggtccttcctaagactcaacacccagttagagataatggacaaagccccagccgagggcttattgaccttatttatgccaataacacaaactctgactctggagaattaagggatgttggaaacagtcactgccacttggaggtcaattaaagtccacctttgagcactggtggagaggaggcaggaagcctgcagagataaaagtatcctaatttaaatgttaaaaggaccattacaggatcttaattccttctagcaaacagagcatgtacttagatgacaatgagtataaatacaaccactctagaaagaaaagacaggagctctctgctccaaagagtattacagctttcacaagaaggacctgagctaacttctcatgtttgtaggtgggcgatgggataagtttgcagaagacccatttacggggaccatgggcaaacagaagcagaccatgaactaagttaaaattcaaggcccccaggtaaaccagggcaaacatccctgactccccaatccacctcttctaaaactctcttaagaaacaccatgatcagtgtcttcatttagcaaagacgtcttcaagaaccacagctcgtgtttggggcaatcattttgccccctctagtgagggggcatttctttatattaaagccctgagaattaaagaaaaacaatatgcagaaagtgcaacaaattattatccaggctgtgtgcttctctttctcagaacattctattaagattcttcactaaagaatgcccttccacagagcaccaccagacaagagcttggagaataagtacttatatttcctagaaactgtcagaccagaataatcccatttctagaaacggcaacaacagtggccaaaaaaactgtttattagggaaataattatggaaatttcactataattagggaaaatctcaaattctgtattttatgtttccagcttttactttttctgataggttctggccaaattcccagaatgcatttatctgatgatgtctcaagtgatggcaaacacagaatattatatttcagttgtttgcactgcttgtttctccatagttcccaccctcgatgagatgttttgtgcctttggaggcatagtgctgtccaaatgctttggggcccgtaggatggagcttggtgtgacctggctacttaagacacagccacacccaaaggcagctcagattctcctttaagaccctggccagtgtctctctgccattccaggtagtgttaaatctggtttgtggacaggttagcatgcaaagcaaattagaatacaaaaatgggctgcagacatgtaaatgtctcaggaaccaagtgagtttcctctgatgacatgaatgtctacgtcaaatcagggtatggatgcagagcagctggtgttcatggtgaaaaagatgtgactcaagtgccactgactgcttctcccgaactctgccttatcctcaattatgtctaactacaaaccgagatatcttcttatctaatgcagtgacaattaaaatgtcacccttgagatagtaagagtagggcttctgctgcagagaactctaaagacagtcagtatcacattcagactgtgtgcaggaatttcttccccacagaggatgtgacaacttcccagggctttaaaaaagcctcgatacctgaaagtaaatacacgtcaccccaacatggaaggcaatgtggtcactgcaggtgaactctcaaaatgtaaaacctaatacctcaccaagttgcctaagagacaggtctcaaaacacctatggctccagccccgggaacccatttcccttttcctctgcaccactgagtccaagtaaacagcacactctgcttctgaggacactgaggttgactccattcgagctgataaaactgcctccccaacatgtagttctttttccattttctcccctttttccttttaataaattccctgctgtggtacaagggaccggaacagtaaagctgaaagtctctcattaattataaaaatgatttaatctgctggaaatatttatttccagagagggaagtgtggtgtcccagctctgtaatgctatcaacgttatgtatgtgcagtaagtagaagaatggctccccaaagatgcccacctcctaatgcctgcaacctctgaatgtgttcccttctatgacttaagagactgtgcagatgtaagttaaagatcaggcctggccaggcacagtggctcacacctgtaatcctagcactttggaaggtcaaggcaggtggatcacttgaggccaggagctggagaccagcctggcgaacacagtgaaaccctgtctctactaaaaattcaaaacgtagccgggcatggtggcaggcacctgtaatcccagctactcagggggccatggcaggagaattgctagaacccaggagacagaggttgcaatgagccgagatcataccattgcactccagcctgggcgacagtgagactgtctcaaacgaaaataaaacaattaaaattaatcttaaaaataataagatcaggcccaaggtagtcgctaaggcccttctaagcaaaagaaggagcaggaaggttagacaagtgagggccagagtgaggaggttgttggctttgaagatggaggatggggccgtgagtcagaatgtggagctcctctagaagctggaaatagcaaggaaacagattctcccctagatcctccagaaggagcacaggcctgccaacaccttgatgttagcccagtgaaacccactgtggacttctgattttcagcactctaagataataaatgtgtgctgttttaagctgctaaatttgtggtaatttgttatagcagcaatgggaaactacagtatctgttacttcctccttcctgatctaatccaatctaggagtttggggaagtggagggaggaaatctagctaatacccaaattctctttctctactatttccactaccaagtatctgttccattatcagaaactaaccaagtgatggtttatttatctggaaaccactcagcatcatagagtttttaaggctggataaactagaggccatttaagccaagcctctaattttatccaagagggaaagaaaaaaaagaaaaaaggacaaagaagggttcaaggaatgcccttggacaccagttaatgggtgaattttgctggctttctaatccagttctctaaatttctcatctcttgctagtattgtcgacaactcactccttcagaagcattcttcctgccctaagccagttcccttggcaaattttcctttaaaatgaatatttcaattagtaaactacacatattttgcatattccaactagaaagcagcacagactggccagcaaattcatgccaagctagactggctcaaagagcttcagttcatatgacaacatccgttcacaggctcagcccaggtaccacattatcaaagattgaaattttgaaacctggtgaattcagcttctgctgaaatgcagaagatactgtaagcgaatatacaggtttgtcaaggtctatgaatttcatccaaaatactaaggagagtttttactaccctaaactcacagcttttacagggcttgtttttatttatttatttttttgaaccaaaatcatagatttagagttggaagtgacctttgtgatcattatttcaatcctttcagagaattctctctgcaggaatatctatgtaggacttggatttgacccaagcacatacaatgtctcagagggctctctgctcctggccaagagcatcaggtcttgtttttaatataatcagtgttgtaaattatggcacagagaacaggctcattcagctgtggaatgaactgagttaaatggacttgtaaacatccctaaatgaaagaattaaaaagtcaaatgaggaattatatagccgtcccttggtatcctcaagggattggttctaggacccctggggataccaaaatcctaggatgctaaactccctgatataaaacggcatagtatttcaatataatctaagcacatgctcccatatacctgaaagcatcgctatagattacttataatacttaatacaatgtaaatgctatgtaaatagctgttatactatagtttctttatttgtattattttttattggggctcctttgctgaatattttcttttttttttttttttgagacagagtctcactctgttgcctaggctggatggagtgcagtggcgtgatctcggttcactgcaagctctgcctcccaggttcacgccattctcctgcctcagcctcccgagtagctgagactataggtgctcaccaccacgcccggctaattttttgtatttttagtagagacggagtttcaccgtattagccaggatggtcttgatctcctgacctcgtgattcgcctgcctcagcctcccaaagtgctgggattacaggcatgagccacagtgcctggccttttgctgaatattttcaatccaagtttggttgaatccacagatgtggaaaccgcagatatggagggccaactgtatcatgtcaaatgtaattaagttttacttacacagtagtatcctgaatctaaaattaattaattagttaaagccaactagaaactagcaaactagaaaacagatttcaagattctcaactaggttacaaactccttgagggcagatgctgtctaaacatacttctctctcttgcctgctgcaccttatttaaccacaggtgcacaatcagcatgggctgaattcaactggtatacacagttcctgcttagctcccagaaatgaatctagaatacatttcctaggaatctagaaatatgaagcaatatgatgaactgtactttcttgtggccccccaacagaactcacgcttccccagctcataaccacttgcagacataatttaaatttgtcctaatggcccagattcctgtacaaacaccagattcctgtactagtgtttgctccttggtctgaagcttatttttctcagggtacaagaaaggtctgatgccgcagatgttatatctgcgttctgggtcaatagactcaccacacaaaaagaagagtaactcagcctccttgacgtctgatgttcctcaagtgcctggccatgaagacagaacttcctgatcttattttccttgctcttaactcactatgtatttcactgtgactcttgtcactatcacttcagcagagttcatcacacagcagcactccagtggcctagctcagacactgcaaaccaaccaagaataagaaccagaatttacagttttttaagagaactgtactatcctttagaatagccagagccagagtgaacacctgctttgctgcaaatcagaatggcatggtagaatgacatcaggtcggatgtcaaattcaggctgaaacctaactatgccttggtttccttgtatgtttgatagaggcactgtgtctgctgcattaggttattatgaggactagagagaatataggtaaagatgctattattagtagttagatgtttattgtaattttgtttagctctgtcaaagaatattacttttaattaaaacgttaatatagttcatcttgaagattttctttttccttacatttttatctggggccttagctgaaactaaaaacaaacaaacaaacaaacaaacaaaaactctatgcagatttgtcacctctcttataaatcattttcattttcctgaaacctggagacaagaggcaaaatgaaacctaccatctcttctaaagggagggagggaggaaaggacagtctattagcaaaaaaaatatatacatatatattaaggcaagactccagaaaaagaaaaaacacaggcatgaaccaagcactaaccagtgtgcctcaatgttttacttgagggaaatgatctgtatgttgcccccacccccggccaggatgcagccaaaggacctggatagtgaactctgcacttctctaaaaaagatggctctcaagaaggtggaaacctaggatgacagccaggaaaaggttggaaccagaggtggggtctttattgggctgggagcagactaagttgtacccagtagctggcaatcaggatcaaggaagaggctacaaagtcagatcacagtagagatctgggatacacacagaggtcaaggaaaagcaaggttcagaaaccagcaatgcagcctgaaccacaggcagaaagccacagcaacactaagatctgatgcttctaagttttctgctgggggctggagccatccacaaggtaagccaagcccacagtccacaagtggaatcaggtcactgtcctcaggaagtagggcgacaagggttaggaattactcactgggtacaatgtctgtcactcaggtgacggaaaccctaaaatccctgacttcaccactatgcaatataagcaagttacaaaattacacttgtactccatacatttatacaaatattttaaaaaagaaaaagtcttgatacagaggcccattttctctaaccaggaaggagtttccaaactacaagtcaattctttctaaaagcacctctctctccttcactcagatctggagacagaagaggatgcctctgggcagccaacccaagcagagctgggcaagcgagaaaatcgccaccatgtcagtgaccacctgctcacccaggcacttcctccaacagaagaccttctgttgagcctccaccctgcatccggcattcctgaacgtcccctgacctgcaccccctcatcatctggcttaggaaccatttggcctctgacccacccatgttctatattcacagacaaaagaatagggagactgtggattaggatcacagggcctctataattaactctgattcacccttcacactttctgacacacagaatcattgggggaaaactcttctgatttattgagggttgagtgtaaggtactgtcataggttagctgtgaaaattcatttaattctcacacaaccccatgagttagacaggatagtgtccccatcctcactttatagacatgaaaataaaaaaatcagattccagtgagtggcatggtcagaagtaaactcacatttggcctctggttgatcaacagttctcagtaggcagcctctgtagaggaattatgtctcttagggataaaactgagatgtaatctcacagaaagctcttgtgcgttttttaaattcctttaaagaaaaatttgtattgatagttcttcccttgatttagggatttttttaatacctggtttcttgaaaagctttttaagaggatctgccaaattacataagcatttctagtttttcttaattttaattctcattatgagattttctcatcaaaaataattcagatagttctaaaaatgtcccgtaagtaaacaatgtcaggaaaaagtgagatatgttgaaatacgaacaaacgaatgaatgaatggacaaacttcagaacaaactatctaactgcagcaagaactgggactggaaacacctaaccaatgacagccccatagtggtttctggatgctaaatatagacaaggtccaaattcccaaagtctaactctggctttatcacacatacttggcaaaagaatgttatcctgataaagccctcctgtctggccatgcttaagtaaatgtcccaacatggactgtcttccacctagctgccaggggaaaatggatcacttctgtactcttggtgtgtagccagactatattaaaaagtccttcatcctgcctcagcaacaaaaagtgcactgccatcagttacgttaaagctgttgtgtgataaatttgaatattgcataatggaggggaaaaaatcaaggacttacactacagctataaaagggatatgtgaagctatttagtcatgattttgtcatggagtagtgacctagacaactcaaattccaattaatacttgaaaagcccttgggacatagtgtgatatgcattcctataaaatggctcttggctgggcttggtggctcatgcctgtaatcctagaactttgggaggccaaggcaggcagatcacctgtggttgagagttcaagaccagcctgaccaacatggaaaaaccccatctctactaaaaatacaaaattagctgggcatggtgatgcatccctgtaatcccagctactcaggaggctaaggcaggagaatcacttgaacccgggaggcggaggttgtggtgagccaagattgtgccagatagtgccactgtactccagcctgggcaacaagagcaaaactccgtctcaaaaaaaggataaaataaaataaaatgaaataaaatggctcttaaaataatgcatttgaattcctaagtatttatatacaacattgcccccttaattttattttaagcaaagaacaacggtatttttcatttagcagttgtgacttgctacgaggaagtctaggtcaatcagccggtttgcagttcaggcaaatctaagctacctgactccactgtgccatgaggaaatgacagacaagagaacgccctacaggccctgaggttttcctggagtaccttccaaaccatggcctgcattgtgcttatgacctggacaggtcaccgcaagcccctgctggtccaggcagtcaagaagggactccacagtgtcttcacaatcaccgcacttctgcctggcacaacggctttgccaagctaccctcttcgtgcccaccgtttcctttgctgctagaaacactcacaaagcaatagagttcttacagttctctgagctccacctcagcgcctgctcataatggaaaacggctgctgccagagccacttccaccctcacggaagcggggtcacggctgcctttgggagtctgatgaaagctgtaggctgtcttctcaggaaagacaaaaatgaaagaaaggaacagaaatgcagagacgatgagagggattccctgacctccaggttaaggatcctcagctttacaaggctaagggaggaagaatggagggggtggtggaaggagaggcagagagggagagaagggagtacggagtgagccagctccagggaccagccactgaacaaagtgctgcccttgtctcagcctggaatcagacggtatgggttctggctcaggctcgagattcccagtgaaagccacaaagttctatgacttcatcaaaaatgttcccttgcccacagtgccattagctattccacgtgaccacaccaatctttttgaccaaatattctctctcactgattaaactattctactacaaattgttgatgcctttgggcatatacaggatggaaatagcttagaaaaaaaagtattctatttaacaaaactttacagtaatcggtacagtccctcatttagtcaataaacactcggcgaccacatgctatgtgtcaggtcatatgccagctacaattaataacaacttaaaaagtaatcatagctaaacacattgtgcacttaactgtactaaacactttacgcatattagctcatttaatcctcacattaatcctttgaggtacgtattattctttcttttccactattcacaatagacaaaatagagctatccacagctagctggtggcagagcaggggatcagaactcagactatctggttcacagtctgtgttcttaatcattacagttcctgccttcaaccaacccacacaacaaggagaaatgtaacagtaccaaaaagcactgcttgtgtttgacagttcgacagtgaaatgaacacaaccagacttgatcattacacgtcgtatgcatgtaacaaaatattatattatacgtaccctataaaaatgtgcacgtattatgcatcgtttaaaaataagttaaatcatagagttaaatttcttagaaaaagaaaatgaacacaaccataaaatatgcataggtataaaatagttttttcataaaaggggaattctgtttgatgtcttattatacacattggagaaataaaatttattatgaaggatttatatagattgtccaatttcgtgtatctttataatatcaaaagttccataaagagaattcactttgagaataaaattattttcaaaaagaatagcttatagatgttaagtgttttcattggttgtccatagtacacctctttatccaaatatattagcatattgcatataaattactttattaccaagaaattcggaaactgagtatacaaaattatcagtttctgtctcaactattttgagatggcagtgaacagactaactatgatttgatgataaactaaagaaaaatatcacgctttgtcgaatataatcaatttggaattgaagaattaattgtgatgcaattacatactttcttaaaactaaaaaaaaaaaagtcaaattgactatcaaaatgtctttagcagaaatatactcacagctctttttcaaagcaaatgtacaaaatctcctacagccccttgctgtccaagagagtcacgtgacgtaaaacatcttcctcatcacctcggccacaccagttcccaattccatatgctcacctaactgcacccctgtccccaaaggctccagtctccctcaatcttacctgccctttatgcaacatcatttcctccctgaggctctttcttggtctttcactgagctcccaaaatcctagattccaaaaccactctcagcctgttaccattcccaaatccaataagcaaactataggacttatgaactccaaaataaatacctgggtccctaccccaggcactctggatccccagctgattctgggaagcagctaaatttgataagccctggactacaccatagaaataagcatttagttataggcatcactttctctgctgtacattgagggaggtgggctggaaagatgatctctaaggttccttccagacagatctaacagtccaagagtccagactctatagctatttcatggatactggtttctctccacacagactccatgcttcttcagagcaggggccacattactttttcactgtccccaagccagcatggtgtgttatgcatagaaggagctcaataaacttgtgactcgtgggtttctatgactgtgcccgctgactgagggtaactagtaagctgagccaggcactgctgtggcagggctacttggcagatcttgtgcagacactgagttacatcttgctccaaaggaacctcccacaaaggcatcaagatgtcaacactggatttactgtggtcagaaaactgtagaaatcaaactctttcaaattctagtataccaaaatacaacaagttctgactttctgtttatatgttaaggaaaccacagaaagccctcagagataatgtatctggtttgtaagaattatgatgcatactgccatagtgtcataagaattcccatatctggctgggcgccatggctcatgcctgtaatcccagcactttgggaggccgaggtgggcagatcacaaggtcaggagactgagaccatcctggccaacaaggtgaaacccagtctctactaaatatacaaaaattagctgggtgtggtggcacaagcctgtaatcccagctacttgggaggctgaggcaggagaatcacttgaacctgggaggcagaggttgcagtgagccaagatcacaccactaaactccagcctggtgacagagtgagactccatctcaaaaaagagagagagaaaagaaaaaagaattcccatatctaagagaacctaatggtgagaagaacgtatcatggatctttttgctggaatgacagtggggtgatccaggtaacaattcaagtccaggaagtatattaaatgggcttgaatctattaccaaggttattctactattgaaaaaagatgtttctagctggccttctggagttgtccaatgcctggctactaaaccttcttaacaagaaaatcacctttgttgagataatagaaaagctaagatttatacagagaaacaacattccacacatttataaaggacttaatagcttgaatcatttctatctgttatgccatttaaacctcttacaacagcccttagagttaggcaagacacacattatctgcattttacaaatgagaaaatgaagctttggagaaggtaaaaacctaccccacagtggagctgaagctcaaccctagggccttacacttcatcagtgaccccctgaatgagggattctatagaggcagatgtatgatgtctggccaagaaagtacaggtgtgggtgtgtgttgtttactgtattttgcttgttttgcttttcatctgaatgtattgaagcaaggtagtagagcttcaaatggaccacaagccccatcacatccaactgtgatactgtttcagacatttatttggtctacttggccctgaaggtatttgaattttttacccctgtgctaaataattatacttacatacttatataaataattatatcttcccatcatgtaacatcttatgagcatattcactgcatattttatttcttccttataatcctgtttactcattagaggactaagctaaaaaaaattgaatgacttgcacaagatcaggacctaaaatctaaatgtgtcatataagaaattacattatgtgagaatttcttaagcaggtgtcaagttaaaattcttcagaaaatcattacataaaagtttctgaacttgagtactcaagtactcaaatctcttttgagatttgattattcttacttacaggactatcattcagagaatatgcagaaacaatgctttcgtgtttccatgggcatgtcctgagaaagtcatattcctttatttttatctcaagtgttcatgaactttcattatcaaagaagaaaataggcaactgtttctgaaaaaggaagtcattcaacaaaatactagcaaaacaaatccagtgatatataaaaggattacataccataaccaagtgacatagtccaggaatgcaaggttggttcaacatataaaaatcagtcaatgtattaaagtatataaaagtatattaatagattaaagtatattaaagtatattaaagtattaatagattaaaacccatatgaccatctcaatacatgtagaaaagcctttgacaaaaatcacacatccttttgtgcttaaaaacactcaacaaactaggaacagcaggaaacttccttaacctgataaagggcatctatgaaaaaccaacagataatatcacactcaacagtgaatgacaaagctttcctttcaagatgagaaacaaaccaaagatgtctactcactccactactatttaacattctcctggaggtcctagccaggccaatcgggcaagaaaaaaaaattaaaagcaaccagattggaaaggaaaaagcaaaactatctctattcacagatgacataatcatgtgtatatatataaaatcctaaaaaatacacacacaactattagaactcatgaatacactcagcgaggtcacaggatacaaaatcaatatataaaaaagaaagtaaaaatatcagtgatccatgttaccatcactaaataatcactggcacctaaaaagcttcctcttttagttttattactctcaacctgggatatagaaatctaaaatccagagtttactttagcttttaaaactatctatgatatcaggttaaaagaaacatttcctggcagatgcacagctctggaaaattttgttttccaaacgtctggaaaacaaaaggaaagcttcctttgtttacatagccaagaaggttgagtgatgagaatcagaaaagattttgaagcaatacaagatcttctcctagggccattagagatcagctaatctgttcaagttttaattctcttctaatgggtttcctcaaagtactttacagcagttgcaatcagttccaaatattgcatcgtgatactcacataaactggaaagtaacggctacatttccatttatttcatttatatttttactttggccagtctcgtaaagattttaaaaaccattaagtacttcacaatattggtggggactgtttccttcttcattttcattagaataaacacagaagtggtatctatcctaataatacagaacatgcttcttaggtaatataaaccaaacacaaatagaaagaagcattgttatacattttaaaaaagtgttacacttatttttctgcaggcctgaatacagaccctgcctgctctaaaagtcacgaggtataaagtgtgaacctatgctctgggggctcctgataagttccaggaaactcctttcacagcctctatctcagggccacatcaaatacacgttcactcactggcctcaacagtcgattatcactccctatttatttgtaggttcacatatttttgccatttaaattttttcaaaaattaaaacctggctcaagttacaagtaaagcttgggttaaggaaagcattcatgaaacactttgttttctgtaaatcagatagtttattgcctggttcccttccaatatatatgtgggctttactctccattcagaatttgattctaatttttaagtggcaagcaaagtcgaattattaattaaagaatcaagacatataagtataccttactctctacatggtgaaggcaaacactttcaaagacaatttccctaatattttaaacctatcacatgaaaactttagccctttggatggaaacatttcactgactttcttcatcagtcccccttttttgccataaaaattcacgagataataaattccagtaaaaagaaaaccacacagtaaggcacagatctttgatagtataaaagaacattatctaatttaatccccataacaaatcagtgacagtattatctcatttatatataaggaacctgaagctcagagatgctgagttactaaagatggcacagctagtaaatggcatgtcagaatctgaacccattgctggatggctctgaaccctttgcccttcccaacattaattcgtgcctttctggaattttgccagccaagtggattttttttaacctaacttaaaatattcaaaaataactaacgttatttaacgtcttattctctaagattttttaaaaaaacatttaaagttatttttgtcatctgttttaatatgtcccaatcccttaagctaagaatctatcatttttactttacccaactatctcgtgatataaattaagcctgtttactctttccaggtcactgaagcaatgcttctttctagaattagagtcatacaactagaagagatggtctgactttgtacagaccatttgtacaccatgtgtagttccatttctaagaagaaacagcaaaatgatctacatgaaaaaaaaaatcaccttacaatttcagatgactttcatgaagtggttttataaattgtattgctgtaccatcattattgttattaatgaagttacatttaggtgttatggtagatttgaccagatgtggcaaacagttgttaccattgtcttcatccataaaatttgtcaaattagaggttttatggagtatacaactaattgcaagaaattatataggcagtgtatttttaacattttaaatactaacaaaaacagcaggacttaatgacagtgaactacagacaatccatgcacagtgaagcctgtttaattagaattccactagtctaaaatctgtaatagcttgaacacaatatactattcattctgagtttgaaagttcaaaataaatctcaagatgtttttccatatatacctcactgtacctgctggagaccatttacatacatacatacatatatatatatatgtttgtttttgagaaggagtctcgctgtgacacccaggctggagtgcaatggtgcgatctaggctcactgcaacctctgcttcccaggttcaagtgattctcctgcctcaggatcccgatgagctgggattacaggcgtccaccaccacgcctagctaatttttgtatttttaaattttgtatttttagtaggcagggtttcaccacattggccaggctggtctggaactcctgacctcaggtgatctacccacctcggcctcccaaagtgctgggattacaggcgtgagccaccacgcccagcctatatcacatatattttaaggtcgcatgggacctcagtactcatgccctctgattctgtcattaagagatacatattacaggatagtggtgatgtgtaggggctctggagccaggctacctgcattaaattcccagctctgccttactaactatgggaccttgggcaagttaccttgtgcctttgtttccttctctataaaatggggaatagtagaatccaccctacaggtaatgaagattaaaagagataatacatacctgtgaaaggctcaggacacttcttatgtgtaagaaacacaacaccctgaggccagctggcctagatgtctttccaaggaaaatctgccatcaaacgttaggacaacatcgtgggactcctgtcttttctatttgaaaatagtttttaaaaatccatttaaaacagcccacaattagacaagctcactaatttttcctggctatgtaccttcaccaaattacttctcaatcaaaattactttaaattacagatagtatgacatagatgtatgccaaaggggcttatgcggacttttaagtcatatattcaaaaataactaggaagaacctactagtttccctttacaatctgatgtttcatattaccctcttctttgtagttccattctgtgaaacttccatttctcataggtattttgttaaatatcacccctacccacaaggtttatcccaaagtatctacacagattccaccctcgcgttcttcctctgattctgggcctggcctgcccacatctcctctgaggccttcctccatcagtttgcccatctttcccctcaagagtgggaacacgcatagccgccctcccacctcccatccattctttcaccctcactgccaactccaaaaagcagctggtcacagaccccactggctcatggcctcgccctggctgatctttccttttcaaccctcttcaccggctgctttccctcccactacaccgtggtgcctgcagcctacttctcattctctcctcctccgccctagacaatcttgtccaatctcaaggctttcaccagcacctgtatgctgataacgcccacttatttccatcctgaccttttccctaaatgtcaggatctttagtaaacttcctagagacaattttatcttcatggtccaagggcatttacacgcaatacatttaaatccaaagggttcctctttccccactcagcttgctcttcctcctactttccctatctcatcacacaagctagatagcctcaaagcaccctcatccccttctacccagaaaatgagtgaatactgtctgtgtcatgcccccaacagctctctactccctctcctcctctccatcctcaccggcccaggctagtcagccctcactcctcactgacctcctgaccttcagacatggcctctcacaaccaccagactcatccatctatagtgccttctagaaataataaaaaaatgcaaacgtgaccattttgctcccctgcttaaagccctcatgcaggccatcacctactggaaaatgtttgagctccttagaaagccatgcaaggccctctgagagctgctcccagctccactgcccaacctcccatcctgccattcccaacctgaatgccagggacctgaaactgacctgcactggtcactgctattgttcacaacttgctaattttcacctctttgcctttccttacattatcgtacctgccatatccctaccccgctcccagcctggctaactcttatccttcctttaagactgcaatcagatgtcactttctctaggaaatcatccctaaaataccatgctgagtagggtacccccgtacatactccacaggatttggggcaggtaaaaagtctacttagactaatgaaataatctgttcttattaccaggctaaaatataaacatatcaagggctagaaatgtggtctcttcacttctgtgtctggctcaataaaaggatgctcatctcaacccagacacctagaaatccagaggaagaaagttacaaagagcagcttcaagccctctatactgtagacggattgcgttacattattatatattttagggctctaaaacattaccttttttttctttctgagacaaggtctctctctgccatccagactggagtgcagtggtgcaatcatggctcattgcagccttgaccttccaggctcaagcaatcctcccacatcagcctcccaagtagctggaaccacaggcatgcaccacgatggccagctaatatttctgtagagatggggtctccctatgttgcccaggctggtctcaaactcctaggctcaagtcatcctccttcctcggcctcccaaaatgctgggattacaggtgtgatcagcctgtaccaccatgccttgtctaaaatattacttttgtcctgctgaggaataaaagtaaggaaaagaaatcaatttatgtaactaattatttacctaactattagaaaccaacataccctacttcctctcagactccaaagaattttctcaggtgttccattcatattcaaagattaaactctacttattgaaaaaaattaaaggaagtcacttacaaggattggttctcaaaagcagctatgccatgttctggggaaggaactaccttcaatgaaaggaacacaaataagagagtcctggtgttacccgctgagctgtcctctcctgcacgtagacatgcttctgcaaaaaactcagcaggctccaagtcaaactctgtcctgggctctacaatatgccgccgcacgtgatgatcactggtgctcaggcagaacggactttatccacatcactgtaacctgagcccagacttcatcctagacagtcacacagctagggccacaggtggcacaccatggtaaaaacgtgagaccatctgattatccatcaaaacagagggcctactgcacatagacatagatgtgagttggagtagtgtggtcttcccatttctgatgttgccatctatttcctcgagatgacagacagctcatatattttgctcaaagggttgctagagctgtatcctcctttaaggtgaatcctcatttctactcccacaacagaagtggtcctcaacctctttggcaccagggaccagttttgtagacgactttttttccatggaccaggggtggagagatggtttcaggatggttcaagtgcattacatttattgtagacttcatttctattattacattgtaatctataataaaataattatacaactcaccataatgtagaatcagtgggagccctgagtttgttttcctgcaactagagagtcccatctgggggtgatgggagacagttacagatcatcaggcattagattctcataaggagaaacctagatcccacacatgctcggttcactatagggttcatgcttctgtgagaatataatgccagtgctaatctgacgggaggcggagatcaggcagtaatgttagcaatggggagcagctgtaaatacagatgaagcttctcttgctcgccatccactcacctcccactctgcagcccaggtcctaacaggccccggaccaatattgatccacagcccgggggctggggacccctgcactccttaacagaagaggggcctggcaggatgtttcagaaagtggaaggaagtaaacatttgaatcttcggcacactgagaaggcctggcaaggaaagtctacctgcttcttcccaggatgctctgagcttctattttagtaaactacagagtctatggccagtgaagatacctacttcacagcctgagataaagtcctcggcctccaactgtagtttctacctcagcagttctgagaaaggacactagaagcctccctgccatggaatatgattggtgggacaagaagcaagtgggccatgtgggcaacctatcttctcaaccaaggcagggtcccagggcaaaagcccagacaatgcatctaaaggtcagaacctacctgaccatcatcagtagctttttctattcttaaggaactcctgaatgtcgcttcttgggacccaacagagtaaacctctgagtctgacagtcttttttttttggtgtgtggtggggggcgggttgtctgaatcacctgttatttgtactatttattgatagtaaactgtattttcttaaatgtaaaagaaactgtattaatttgatgacactagtactgaagcaataatcaaatacttgcttatcttactacgggcctgacctaccttcaggcttgagggcaactgttttcctctctcctcccccacaatctgaaggaagagttagaacagtggaaagtaatgttgcatattacaagaaatggttaaacacaattagtcagatcatataatggactatgacgtattaaggcagtatcacggctaccaggagtacagataccaactatggccccaaataatgctaaacactattgcaagaacttcatccacgagttcacgtgtctcaagactgcaagatttaaatttgccctactattcgtgaaaattcacctttcttttccaaatctggaataccccccattgtttaaatccagtctgggtttctcttgtcagtagcagtcttcaatgtctacttcagagaatgaaaatgtgtgtatgtgcactcatgtgcttatgtgcacgcacacaccctccttagaaagataaagtcaataaacttcctgtcagtatcacagaacatgcaaagtcaattgtgcaacatttccttgcattatccatcctatatgcaaacattctaatgaaatagaactggaaattacacatggaaactgcagctaagtttggccacctaatggactcagggtactccggtaacggcgcagagagaagaaggttggccgagcggggatgcaaggtccccaactgaagtatctgaaacctactatgggttccacgtagagtcttcagttgtgatttctcgtaggacactaggaaagttgcaatttgcagctatggccacggggtagtgcaataattctgcaaatagctgaccccacccccaacactcccatccccccaaccccagccctcccaaagacagaatggctaggagagaatggggacatttggtctgaatcctgggcatccacaggggttactgagagattctccacaaatccaaaagtgtctgtaagactatacagttactctcagcattcgagcccgatacaacagaaggtcccgggctttgaaggaatgatgagaactgagaggctataaaaagtgattagcctatttattacaaattgtgtttacttaggtttttatgtttacttcccaccatatctccaccagaatacaattaaccaccccctcactcatcagaattgtattagaaagactcacaaaaataaaataaatactgcatctaaacgcaaccgtcaagctttatggaactgtactgttattacacaaaggtgtccccaaaacagggagaaggaaatgcaaattttgaaaggtcttcttttcaaaggaaatttttgtccatttagtccttacaagtcaaagtttggtctgtggaccaaaactaatacttgggagccagttagaaatgtggactcctggttctattagattagaatgtgtattttaacaaggcctctagattatttggatgcacatggaagtttgagaagcattccccgagtgagagctaagcatactgacctatgctctcaaaactattttctacaccctgggtcttttcttcttctacaagcattctacgtgaaaacaaatatattttgaaattttaaaacaaaaacagattatttcccagaactggtggtgatccactacagtaaagcctcttcctatctaaattgccaggtaactaattaacatgtcaatgaacactggctgaaattctgttctgtcacttcataacgcaggtaaacagtacagatatgagaagaaaaatttaagaccaacagactcacatcatggtcctctaggggattttcgaaactaatttcctgcccatataaaaggaaaaataaaattatttccagtatcaagttaagcacataactctctaaatggagttgctatgttaaagtggtctccaaattacagtcatttttgtttacctccgctaacaatgagcctcctgggaagaaattatgtgaagaagtttaagtaccctctatgcctttctccacaggtgagtggggaaattgcagaggaaaaatacacaagtgaatacaattaatgacttctgcactctttgattcctgctaccctgtgaggggaatgatcatagaattttgaagctggaaggaatctcggagatagcctattgctgccgctctgcctacccaggaatgtctttctacaaagtcaggtaattgttaccctttgagacagcccacatcacatcactgttaaatgctctcacacccactgatcttactcgtgcccttgagcaacccagaacaactctattcccacttcccagctaaatgccttcaaacacttaaggcccctatcatatcccgggtggtagtttccttagattgaacccatttagttccttggattgggtggtgtcctcttactctgatataaacactgtgtattttgtttccagtgaaactaaattatgattagcctgacataatttaatgagacccacagtgccaaatgaagtcattcgatgtaatggttggtaatgcaatacattctcagtgaaacataaaagattatgtaatggttaatagatctacatatgtgagtagtaccaccgtaagtaagagcatatttgtctgctggactatgatgcacgactaagaaaagctaccaacctctactcaaaaccgtcccagggtcctgttgccagggacagaacgctgcaccgcatggactgctgaatctgaccttatgcggcctttctgtattcttccttgtttatgaaaaagagacatttttaagaaagcaaagggtatagaagagctacatttggcattcagagcaattgacacttttattacttaacatcacaaccttatgaggtaggccagtctaagtgctgtcattttataagtgattaaaccaagactgagaataggaaatgagaaaaatcatgagctgcccagggccaaacagaaagcaaggttggggccagctgaattcagaaacctcaattaaattccaagacaaaagggaacagccaacattgaaaataagttttatggatttcactttgaaataaaacaacaacaaaaaaattatgttaccattaaatgatattaaaatcgtcttttatggggcctcgattttgccaccaaggctttattcccaaaaattaaaataaaaaaaaaatcaaacaggcaaatctattccaggttaaaaattccacttacacacaaaatcttgcattccatattgagaggtttttttttcttaatttgcctattaatctgtattaagccaaaggtcttcgttcaagttgctcaagtgtcattgattagacccattgtagttaacaaggacattctcccaaaatagattcttagcattttaaaaccctcctacattttcacaaaagagaatctggaacacaggaaggaatcatttccccacacacaatactcatcttcatcgtcatccagatacatttggttaaaaacctatccacacattaaggtgcacactccctgggttcctcctccctggtatcctctggggccccagcccagctggagtccccaagttctcggcgccctgaactaaccagtctctccacccagctttctccaaaacacaccccacacgagggctgagctcctccacagcggatgcaacactccactgcttcccatcgaggccccctgcctcctccaggctgatgagcagccccttccccactgctgcccacagccctagccctggaagcctctcttctgagaaggctttgcctcctcgtacctgccgaggcccctccaggcccatgctgagggccaatgagagccacgcagtcaactacacggtgaccttcggccagtgtgagtacacgcagctctgcagagctgctgtctaccaatcagctccaggacacctggggctcagacaggtgcactctccttctgccctttctttgtactctgttttgacccataaggactgaccaaaaggataggaataggccttaaaatgtttgctttactgcagctggaggaaagggttagaggcacctgaaggtcaagatcagggatctgtagcattttctggcactatgaagtaaagtctaaaaaggcctggaggaagccgcccactggcctgcgcatgccccctggcagttgatttgaagacaagcaaaagcatcagcgggcactactaggcagcatccttagggagactaaactgctagtgcctctgcatccctccctgcctgtgttagcctaccttcaccaaacaagatccacactttattccctccatgtttctattcacagtcttcccaccacgtggttttcctcctttccatttcctcctgaaattctactccaggacccatttcaaatgccaccccaccatgaatatcttactttcaacaggatgtgcccatgccccctcaagcaggcagtgtcagccttggattacaggtatttatgggtatggcttattctcctattaagttcccaaaaaacacactgtcctttgcatcctgtacagcagggtttcctaaactgcaggtttcagcctatgaatgggaaattctaaaaaaaagaaaaaagagaaagaaagaggataggaaatatccaagtgtatcacacatagtaataagcgttatttcatgatgctcttgtttcacttacgtgtatgcatgttcaaggggtggtgggtggcagtgttaaacgtgtatttgttactgggggtcatggtctgaagcatttgaaagtcactgccctgatggtacctctcctctgtctaatattctgtgaatgcttattgaattgaacaggttgatgagtatgaaatgatccatgtattataacttcaaaggctccaacttaaaggaatataaagaataatgcctatctgaacaaaagtgtgtggattctggcttatatgaagctgtggaggaatggggtgagtggtagggaagatcagaatatttattatactgttgtatgttgatagactttctctccaatgattaaaatgtgttaacatttaaggaagatgaaatacaagttcattttggaaaacttttctcattcactgaaactacctcatgactacaaagttctgcatctttaaaagagacagtataggtaattccaccatgatgcataaaatgatcttttagagacaccatgaaagcccttgttcaagttttctttgcccaagatgtctccatgtactctcaatacccccacccacaccatctgtcttccaagacttagttcaaaggccacctatttcatggaagcctttgttttttaactcaatttttcctctttccatcctccacccaagtcccaaatatggtctcttttctgaatcaccagtgttgaaaacttcctttttcatgtgtgttcttgtcttaatttcctcacttgacaataacactaatatgtacaacctacgccttactcatccttgcatctcccacagaaaccagcacaaggtcttctacttaagagatgatcaacaaatatttgttaaacgaattaaatgaaagcaacagttagcctgttaaaagggatggtcattattttaaaggccctgaggaatggcttatatgtctagcacctaatcaaaagctggtggaccacagaaggaagaccagggagtggagggggcagccttgtgcctctgcatatctgctgcccctgtaaactcacggaatgcccaactcttcaagactctacagaacaaagctacagtgttgggtgctgaatgaacaccttaacctttttccaagttctccagtcttgcttcaaaccagaaattggaagtggaattagaggtggaaattagggccatccttttcaactttaaggtatggctgaaaaagttgaaacagccatctggataattcaggctcaaaaaacccatcctgaagagtaagtatggatgtttctgagtggcaggaagagtgtgcaagaaggcaaaggaggtagttgtgaattatcaattgattgtgtatattgattatattcaacagaactgagcttttccctttttattttctataaggacactctctgtgactgcaagaataaactagctcagattcaaagccacagtcaccactaataaattccaatttgttcaattggaaaatgatgtccatcaattagaaaaagttcttagggattaagattctcttttgccattaatctgtacctcctccttcctccttcaaaaaagtttttctatgatcaatcaaaggaagaagttttcaatggtctttaaaatgtatattgctctaatacaataattcataattaacaggtatactttcctaactatggtagtttattttcaaatttttaattttaataccatttagggctctctctctttgttattttagtaggaccttaacttccagtccatcgaggttttgttttgtaattaatttcagagctgtccttataagctgagagatatttgaagtactctagaaaatggcaattgtctgaccggatttgaagtcagatcactgggctttgaagctaatttctggttgaaatatggctgccccatttttagatgtgtgactctgggcaggttaccctatcttcccatcttcaattttcctatctttaaaatggaactaataacagtacttgctttataattaaatgagctaaaacatgtaatgtacccagaacagtgtctgataaataatacgtgttcagcaaatgttagttttaaaaagtctgctgtcatctgttttatgacctcagtaaagtcatttaacagttcaaagcttctatttcctcatctataaaatggaactactaccacttacttaccctttccaggattaagagattcaaataagaaaacaatggatatgaaaatattggacacacagaaagttctcaaatattagttattttgaaccatctataagcttaaaagtaaccataaacttaaaaatttacgtaaaccataaaactgagaacatagcatccaaaaattcatctgtgagaaaatgtctaaacatattagaaatgcatactcaagcttggtttttctttaacttatcagaaacatataagcttttgtaaaatgtaattctacatctgcaaaactagaaaccctcccggtcaagccaaactgtcctagtatattgtgatcaagaaagtctacatgccttcataagccaaaactcgatgcactgattaaaatgtgattgcacgtacatcaactttttaaaaaacgtgtaagtttttgttttttttaaagtaataaatgtactgctaatgtaaatttcaagtcaattcaacagatatttattctgtgacactgctccagggtaattcagctgggaactaaggatgcaaaaggaaacagagctcaggttctgtgcaggaagaccccacaaattacgctgataatctcaaaatattacttatgaaagtcataagggggttcgctttgagtcagcaagcagacaagcagcataaaaatataccgaaacagtaagttcttccctttgactgaaaaactgccttttaaaagcaaacagcattttaaaagtacagttgctatctggaaagctattgaatttgcgccagaaaccaacatttctaaatgtaaacctataaaataataggtatctgtaaatgaaaggctgaaataaccccaggagcagcaacacagtaattagcaacttttacacagtcataacatgtttcatattctttctgccctggctctttgaagtttccagtgcaatacgtaaaagttttattacattagggcccgtccttgtgtgttttacaggcaccaacattatgcagagcaagctgtacttactcatcataggatcttttataagaaaccgtttgataatgtgctagctttgtgtccagtttattttgttacacctgtctttaggaaaataaaagtcactggaaacctaaatcacagaaaatacacacagatccacatatcatctatatgttataaatcataaagcagtttagctttaaaattgtacattgcatattcatgtgcacaccacttgcagttttagacacatgtgaactctttactgaattaaagcaaaaggaaaaaaaaaaaagctcagctctacaataagcgattaccagaggcagaacagagtgcagttaatatgcttgttccagcagatgttcatccccgtaaatattaaacataacacaagttcctccaggaatatgcaggcagtaattttaccacctgaatagtgctggttggaaacatttaagagatagtggggggttggggggagcagagaaagaagggggaataagacagatactaaagcagccaatgggatttttaagacacccgcaactggaattaaactgcttccagcggcgatttacctacagcagctccccagtgtgagatcccccgagaaacggaacctggagtgccccccgggctgcgagctgtgagcgtggcataaagggatacccggggcgcccgggtggggtggggaggaggagtgcaactgtgacgaggtgtgaagaaagggcccagaggaactgtgaaccccgaggaaaggagtctccctgggctaaggcctctggaataccggcacggagaaacactcgtttcctgccctggatgttcacttttccatctcggtggaagtgggtgggagagacagaaaggatgcagccgagaccgggcgcaggcggggaggctggagcatcctctaagggcacttcgcagcagcaccaactccagggggtcggtggtgccagccggaggagggagggggcgcagtcggagggaaaggaagtgagaggagcagggggccgacgggtggatccccaggcattagtgacacagtcttcaaatcgcttcttttcctccccacggctgcgctctgcccctggctacctagatcaccagtccctgggctggggcgggccgccgcgagggaggggaacaggagagggggaaacagacgggcaggcggccacgcatcccacccggggaggcagaaaagggctggcgaggcaggcgcccccgacccaccccacccccacggcggccggccgcccggagcccccggcccaggtgaggacgcgcgggccgccgcggccgcccctcgccgctcccgcccgcccgaagcggccggcacggggacttaccacagtgactcgaggtcccattcctggagcagggctaagtcgaagctgtccatggtgggaggtgtcagcgtcgccgccgccgctaccgccgccgccgaggctcgggccgcccgcgcgctgcaacgaaaggcgccgctcaaggtgcatcccagccgcgccagagcggccgccgcccgcccaccgcccacccccaggtcggggctcccgacgccccccgcccccgactccgggccggccgggctggctgcagcggccggcgcactcacccgctccccggcttgcgcgcaggcacactcaagagagagcagcgagctcgccgcgccgccgccgccccccgcccccggccctgcgcccgcccctcctcccctccctcgcggcggcccggcccgctgctgcagccgccgccgccgccgccgccgccgcggtgctctgcgcccgcccgcccgcctctttctcctccgggaggcgcgtgtgcgcgggcgaggccgaggcgcgcgcgcaccgtgagccccgcgccgcgcccgccccgcgcgcccctgtactccccgcgccgctcctcggggtcccgcggcgctcgcaggccgcgccgccctgccgcccctctctcgtggcttttacggcccgcccgcccctcagcagccctggggtgcccggggcggccctgcaagcgggagagagcggcgaggcggcggcgccgagtgcggggggatgcggagccgtgcccggccctgtcgcatccctcggccgcccgcccgcgcccggccccgcccggccttgcccgggctgcacgcacttctcccgcggcccagaatccacttgaccctgctgggcgctcccgcgggcggcggacccgggtgggtgcgggggaattccccggccgcccaggcgcggggagagtgagctgtgccgcccgcagcagcgccccaaacaaaccgtttaaggtctctggagcccgcaagttcagcgaaataaagcggcggcgcggaggaaacctcttccacccggacctgctctccgttgcggtttggcctccagtggtggtcccacccaccctctagctggccagccctggaaaccaacctcctttctttttatttctcaccgggaagggggacaaactggcctctgggtgtcgacttcaaacttgccgcccgtctccggtctggaaaggcaggtgatcagctagaagggtgataagagtatcatcgtggctcctaaagagtaataataatctccctcattgtaaagacagctcttccccctggcttacttttttagacatgctgagaagcgcatgtctccatcagggccctacctctgcttctccacagttggcctagaaccggaagcccctccaaggccccctgactctcctgacctcttggccacagctccggattctcaccagggattccccagaattcctagagagcagctcagagccctgcagttgtgcctcaccacgcgaaccaaacctcgcactccccgccaaaagggagtcccttccagcactctcccctttgttcctttttctgggcaagaaccgctgactggggctgccagaaatgtaaaccctgggtgcaagtgacgggatccctccagcgtcaagccgaagagtcatcctctcacctcacccacctccgaatgaggattaacaaactcaattcaggacacaggtagaagaccaaaaggccaatgagacttctttcctatttgagatcggatttgagaatgctcagcctggctcccttcttcccccagctctgaatcaatcctttcttcattagcatccataactaatgtgcaaaatgtaaaacgctaaattaagacagagttggcatcaacatagtctgagaaaatgaaattgttattttacaagctgataactctcagccctcaaaaacccctctcattagctgaaggtagcaagtagcaagaagattaggtaaaaacatagagaatatgaatataggaaaaagtacaggtgtgaagggctggctgcccaaatcccaatgcacagtgtatttggaaaaagaaaaaaaagaaaaagaaaatctgtctttctaatatccccttagcatacgccttgttggaaatgtttgctttggcgaaagtgagatcgagacattgagacagcattcccaggaacaaaggctgggggtggagggtggaggagggagcaggaacagcccctgtctggaagaactgcaagttctgaggcctgaacaagaaatgtgtcctgttcccgtgctcctggctgcagctgggaagcttcttcagaaaggagacctcccggccctcaccgggatctggctttccttcccttcccaccacatctgtttatacaaaggagggccgctgaaggacaaacataaccgtgtttactgcgagtcccatgctgggcctggagctcagatacagatttgccctcaccatggaggctgaagataaatagatgatcccagaaaaggaaagagggaaggccctgggatggtatagagctggttgaggggtttactcatgaaaggcctctcccaaaaagccatgtagtaacgggcagatttacgtttgaatttaaactctggtgccttgtgttaatatatgagagtgtgtgcacctaaagcaattgcaaggcgggtatttaaaaatgtttctttaggaatagccatgattttctgtttggggcctctaacatggggatagttggattgattatttccagtgttatgttttcatgtaatagtgtcttggagaatgaggacttttgaggaaacccaaatagtagttgcagatcctgttttttactaagctgtcatggagataaatccaaaatagtttttacaagtaaaatgtagaacagttagtgagagcctttatgggagatctttattatttatctggtttatgaagatgttcctattatcctccagcctctgggtatgcaaaccaaaacaagcacttaatctagttgtcaaaattttaactccttaatacaaagcaaaaaaagggtttggacttttggggattagaatgtcagaactaaaagggaacttttttatgtaaaagagaaagagactctctaaaaataaaaatgttagagtgatgttttctatgaagctgccttagcttttgctcatcctatagtgcttgtgacctgagggtcttttctccccacatggatgcaagcaacacccctgggagctgaatcaaaccacccagctaaggggagggctgctgggggaagctgctaaatgagaggagctgcttggcttcccgggtcaggttggttggttggtgtagactaaatgtaccaaagaaagggactaacaaatgaatcctgctcagtctggggccctactcacattctgccaacctagtgctggaagcctcctaaataaatccagaagcaaacctatagcatctaagatctcccttcagatatgatttgatagaagagaagccttgcatggctttaattcatgccttatcctgaagacgcagctgcaactcagaggtcatttttgtaaccaagtgggattttttttctctctttataatcccaccattcccctagaaaaatatgtctggccaaaagctggctctgcaggtggtactgctggaaggtgataggagcatcatcaagctgcctcagcccctacagcatctcctccagctttgtccctaaggacactactctctcctgttccagcaaagctgcagacgcatgactccatctgcttctccttccagaggcttcttgggtgtttgtaactgtatccagggattgcaggataaaccttctaggctttctccttgcaaattacatgctaatatgttgaaccccaggacagcgtagattttagatccacccaggagttcttgtgtcttcaggcctttccctctctctccacaggtatctctgagtggttctaacctaggattcgaggtgcctttctttctgtattttttcatcattcaccaggtcccgagcagatggtgtggctgtgctgactgtcatcactcctcctatgtttccatggaaacatggggcatagggaccatctccgccttgggctctctgacagtatcctctggcgaagaacttcagtacttgtgcccctccccccagcctgtccactgtcctagggagttggagacctttctggggccctagaagccagggtcatttcagagatcatctaaggacatactccctgcaaatggttttgaactggctgggaaaaggagggagggtagaaagggggccaataccccggtcgagggctgagaactgttttagaaggcaacatatttggactatctgtccctgcagccagcttccataatagctgattattgcccagatgtcaaaagagctgctcctagggttcagtctgctcatcagacaacagatatttattgaatgtaagtagttgctgaggttttatgcttcactgacattctacaccctgggaatgagtgtttctgggaatgtgcatttctttcctttttttttttttttttttttttttttaacaaaaccaggtttttccctaaggaatgcaccttccccaaagtttcccgcatcctcctgcctacataattcacttatatagtcactatgacattaattagattcagaagtctgtggaaacagcagagctcggcagggtcagagggcaagcagggcagagaaaagagaggggaaaatgagctccgggagaggggaaggaagtggagggaagtttttcatgcccttcaagtaccaaacaaaacaaagataatttcaaaagtggtcagccactataacactgcttagagaattaaagtattgacaaattgaagagtgctttaaaataaagtggatggggcataagcatgtatgtcttggtgttagttgctccttatacagccggtactaaaggctggtgggtgaagcttaccacattttaaaaagaaaaaggcaggcacacatactaaagttgaaaatgcaggcaggaaggacatttacttttcataaaagcggatcagaaaagcatctcctatcacagatcatgtattttatgccatgctgaccaatgttgggggataatctcattattttgtgatatgagaagatcctttgatgctggtaacaagaaccaatcatcctgacttaaatcttaatatccccacaggttctttgtcatgcttcttcaagatgtgccctggccattcatgcaagtttcaaggactctgaatctgttgagaataggacataactaatcgtatcattagcaaacatgtctatattactgtcaactgggtgctgttctaaagtatcaactccatttagtcctcccaaaagcacatgaggtatgttgccattgtttttattttgcaggtgagtatgctaaggaacaggtaagtgtcacaaacccaagcatggcagatcaggaattggtatggtattactggtagctgtgataccatactccacctcccacaacttttgccttaattatctatagcattggcgcattctcatgctcacaggcactgaaataatgaaagtaatacagtcccagtcggaaggcgagagagagccctctacccctctctgcaattctcctgccacccagttttgccccttgagttctgccataaccgcacctggagtgaggcgctccttgtctctagcctcaacgtcttcctttgcaacatgagaaggctggattgggtgttctttgtctctgtcagtttttgtctctgacagttctgaaatgttagaggtctgtttttttcagttgttcttcctgagcactgccagacaggaatccctggagtatgtcaagagagtcataaaccttttcttgtttaaaggtaggacctccttcttggcttaaacaaatctcaaggtgttggtctgcttcaaacaggagtgctgtgctatctgtgaagtattagcagacggcaagaggaatgtgttcaggaagaggacacttagcttaggtctgggggaagcatggggaagaagtcacaacacaactgtgggtgtcaggctcttttctctggggcaccagagagtattcaagcatggattggtagtccccatgcagccctcggaggaaaccgaagctgcaaatgcagcaattatggcttacagcctgaaaatggtgacattccaaaattgcatcttaatgggtaaaacattggtggagaaagggcagcagaagatccccacaaggtccttcaggtacaggcatctcccactgctcagagtcctgctgggggtccccaagtcccaaacaagaagaagcagagagcagagttcacctcttcaggagcttaagataaacaagttcatgcagcagacacggctggctgcccacccaacatccatctgcacttgtccttgatagcaaaacctgagtctggtttggggaagtcacaagcccagctgacataactgtattttctagtctctcttattgcaagaactgggcatatgacttagttctggccaataagacacccgtttatgtcagtcaggatttctcagaatgttttgcttccctgcagtagacaccaccccttcctctaggtcactttcttcttcctgtccagaaaggtggagaagccatcatcaattttaggagcaaaagccacagactaaagttggcaagtctgaagttaaaaggaggctaggtccttgatgactgcttcatataaccctaccatctttggaccatcctacccagatctggacttttaggaacaaaataagaccctatgtggctaagccactctagcggtgttttgaatattgcagctaacccattagagaagtcacagtcccttaaatgtgccccgcacattgccgtgtatagtcaggactaccagatatcccagcctatatgccccaatgggggcagcactgccaaagaattaagtgtgatttacaaaaacctgtgattacttccttacatgtaatcttgactacttctgagttcactccaattgtaagcaagttaattaataagaaactcatgctcaattgtctgaagactgattaatctggctccagcattttttgaatattccatattatttgtttctttattttcatgttatttgttaacctggttaagttgctgtgacatcctcacagggataccaacagatggcatttacgaaaaacagtgtaggaataataatagtcagcctttcttgtgtccttgccacatacacaaaaatatgtatgtttcagagtttgtcattgtttctaccaataaactaattatcactgtatgaagctgatttacttcagaagaagtttacgaaaacaactaattaagtacagtatgttgaaatataaactgcattacagggttagaaccctataataagatcgcagaagcttgaaagttgggagaagccatcaagtctctctctagctaacctgctacccattgcagcagttccctccatatcaaccctgctatgggcagtctccacatgaatgtttccagtggtggggagtgcgctctctgaagagcctccctgttttacttttcaagggctcagctctagctggaacaacattcttccttatatttatggatcccaaattgatttccctgtaccttcttaacatgtcacaggctcacagtaagcatgcaattagagctcagctttgctgaactccttctattggtcctccatatattgagacttacgggctcaagtatttcctcagcactttggtaagtgaaagagcaaagaaagaagtctttgctcagtggaataccatacagagagggcgagtcagtctcttaagaggagcacatggccatggagatgagagaaaccccaccttcttctaatttgtagttggtttcttggaagaagggagcttcataaagaagctagagctggccacaagaaggaaaatgcccacaacaagataggaggcaggaaacccctggaaaagaaagatacctacctgctagttctcagggaagaggctgggccaggcatggtggctcatgcctgtaatcccagtactttgagaggctgaggctggaggatcacttaagccaggagttcaagacaagcctgggcgacatggtgagaccctgtccctacaaaaaataaaaaattagctggccatggtggcacacacttgtagtcccagctactcaagaggctgaggtgggaggatcacttgagctccaaagtcaaggctgcagtgagctgtgatcacactgctgcactccatcctaggtgaaagagtgagaccctgtctccaatggaagaaaaaaagaaagaagctgcacaatgggaggtagaaagcaggagcccaaggtcgtgagaggaggaaagtgagtgaaggaaggggctctgattagagctacaggcccgagggcctgccctgctccaccactatctataatgagagcaactctttccagggatggctcccagtgtttttccaaagctcctactcacctgtgatgcttattataattccatatacttggcacagacagttacaattttatgaatttagcattgctttctgtcactctctagacaacaatatgaggtttattacaacataaagggaaattcatcctcttggacttgactgagtgtcagcccaaatccccatgctgtcatctctgtcatcttcccttgaagaatgcaacctcaagtcagggctgaagtcattggggatacattcccaaaccagggtcctggggtcaggcctcaagaggataatctcaatgatcacataagtcatttcagatattgatttactgaacaaacattattgaacacctattacatgccaagcagtgagctaagaaagaagatgagaaagagaagtttgaaaggccaaaaagcccactgtctagaagataatgcacacacatcttaatgcacttactcatccttgaattgaacaaatacttcttgattcagttaggtgcttagaactatgctaggtactgagtttattaccaaagtgaaacagacatggtctcatgaaacaggccatatacaatgttgttttaatatgcttagtgctatgatgagagaagtgcaggtactcagggagatctttccagaaagaacgactgatttgcattccaagtcaagaactgaattatcaagactaagtgaataggggggaatggaatagaacaaacgccgtgtactataacgtattacctgctatgacagaagcatgtctgtggagctacaggagcaaaagaaagtggatgatgaccaaggcactcctaaagggcttaatacagcccctaacattgggttgggtctaacggaatgaaagtcaaagtgagagtgaggaggcagtgatggaagagcattccaggcagagggaaaaccacagaatagagcacagaggccagaagaagcatgccatgttcccctagcagagaaggttctatgtggtcaaagtgttgccttgaggtgggggggttgtagaagtcagtaggtcaaatgggggttaggggaagaagcagaatgaagggagatggaaaaggagccaaggccagggcaagagattggggccagatggtgaagaggcctgtattgatgttgtaaaaacattttcaagtaagcaggaaaccaagatcagagattcagtaaagcagctagtgaacacccagctgccaaacccaggggaacaactgagagttgaaaagaggaaatgtcttctgagaagccagagaaagtatttcacagaggattcagcccaggggtttttcttttcttagttgtaaaatccagcaagtctggaaaccccttccctctgcacagagctggcccagagcacagtgaaaatgtgaagtgccttgttcatcaattattaagaattcaaaatgttgacagcagagctttagacaaagatagcacccttctaagggtacggccctgtgtgactgcacaggtcacaggctcatgaagccagccctgcactgtgtttttctgagacagagtctcgttctgccacccaggctagagtgcagtggtgtgatctcagctcactgcaacctctgcctcccgagttcaagggagtctcctacctcagcctcccgagtagctgggattacaggggcctgccaccacgcctggctaattttgatatttttagtagaaacagggtttcaccatgttggccaggctggtctcgaactcctgacctcaagtgatccacccaccttggcctcccaaagtgttgggattacaggcgtgagccaccacgcctggccagccctgcatttttgcaccatcaggcatcctttcactaacagaaagggtgggtgctggctccctggagcctggagtcacaaggactagatgagcaacacattgagagctcagcactgaactcataacatcatgcaagcccccgtgttgagttcattccaaaatgaaaagcttcttttagttcctgattgtattgataatatacacacaggaagacaattcaagccatgcacagcagtaagtacgtgattggggtggaaatgtcaaattataggtatgtatttcaatttttttctcccctttctatgagagagtcctcaaaaagacttttgtttgttatgcaaggtgatgatcaagatgaatcttagggaaactgagaggaggaggaaatggttgtacaaaattaacatgtgggatttcctggtgatcttcctaaaattggctcatagctcaattgcattgtaatcacagagcagactctttatctatcatttggatactttaagacttgttgagatttgctctgtgatcccacctatagctaattttgtaagtttccatgcatgcttaaaaatatgtgtataccagccaggagtggtggctcacacctgtaatcccagcattttaggaggctgaggcaggcagatcactttgaggcaggagttccagaccagtttggccaacatggtgaaacctcgtttctactaaaaatagaaaaaatagctgggcatggtgataggcacctgtaatttcagctactaggtacttgggaggctgaggcaggagaatctcttgaacccaggaggtggaggctccagtgggttgagatcatacactgtactccatccagcctgggtgacagagggagacgctgtctcaaaaaataaaaataaaaataagtgtatcctgctattgttggtatggtattccttatttgttcatccgttatattttcagctcatttttttcagatctttctattcttactgatatgatgtctgatgtattatgtctatcttatctaagaggtttgtcagaataccagtatttcctatgtttccactggtgaagaattctctgtgtcttttagtatgggaatatcaacttttcttttgtttctttcagtctggaaatatcaattttatgtttataattgaagggtatttttgccaggtttaaaatgacagataaacagttcttttccttaagtactttgagtgctgtcaattttattgttgttcctatgagatgtttgtcaacattttcctctataattgaaggtttttaaaatttcttcttataatttttttcaagttattctttacatatttgaaatcatgctattatgtgcctaagatttagaatagttacaccatcctgttgaactggccctgttaacaatgatgagtggtctctcctaatctctaatgatgatttttgccttaaaaatctacatatctcatacagatataactgcatcagctttccttgggtttatgtttgtaggaaaagtatctttccatacttctcctttttgcctttctatatccttatgttttatatgtgtcatttgtaaacaacatatagctctatgtttgcttttttttttaactcagcctgacaaactttgccttttaattaaagaaattaatctatttacagttaatgtaattacatttatattgggctgtaagtctaccattcgcaaggagctatttgttctgatcgttctgttcctttgtctatttttgtgctgtcctcatttggattatttgagtatacttttattgtcctatgttccttctctattaccttggaacatacatggctttgtttactattctttactgttgaacttgaaagtaaatcatgaattcttgacttatcaaagtccaatattaattgttatttttattttcttccaggaaaattcaaggaccttagaactttttaaatccatttactcttctctatatttgtgtatcattgttgtcatgtacttaattttctatatattaaacccccaaagacattattattttatatagttaattttcattagcattttgcttgcccttcattcattcctgcacctctggtcttccatttaggataatttttcttctccttaaagaataccagtatttcctgtgtttccactggtgaacaattctctgtttcttttagtaagggaacatcaatttttctttgtttctttcagtctggaaatatcaattttacatttataattgaagagtatttttgccaggtttaaaatgacagattaacagttcttttccttaagtactttgagtgctgtcaactttactgttgttccgatgaaaataaaacccctttttcctctgtctgcttttaagattttctttttgtccttgattatcagcagttttaccataatgtacctaggtgtggatttcattttattcatcttatttggaattcatagggcttcttatctaagtttgatagcttcatcagtttgggaagttcttagccattatctctttaattatttattttggcccattgattctctttcctcttcttctgagacttcaattttatgcatgctagaatttttagctgtctttctatcttttactttctcttgtgaaattttacatttttgtcttttgaaagcttctttctgaatattttattctaatgtgtcttccagtcaactagtttcttcttcagctttatgtcatctcttgttaaacccatccactgagttcttaatttggggtatcacgattttttgattctagaatttccacttggttattttttattgtttctaggcctctgccaaattctcaaccttatctttttgccttttggagattgtaagcatagttatcttaaagtttgggtctactgactcttttacgtggagcgcataggtgtctatttctcctatctgttgtttctgctgacaacatttcattaatctccttgtagctagttatttcgaattatgtgatcaacattgtatttgaaaaacagtaatatgcaaaaacatttgagacctagggtgatattatttttctccagagagcatgtccaattctgccaagtacttgggggcattagcaattcaagattatctttacataatttcacaagttcaggggattttaaagtatactgcaatccctttagggacatgtatactttcaagacctcatttcttctagtgtatgctttcagtattccaacccaaatgatagagattcactgtactcgagttttccccattggaccctcacttcattgcctcacctgagctccagaagactgtcaagagcatagtttgcctctcttccaccacctccaaaaccagggaaggccaccaggggaaaagtgatcctaaacaccacatttacttcctttgatttctatcttttctggagcagggtgctgtaattctttactcagttgttagatccttaatgcccttatatcctaattatttgaaaacttcttttagatgaactaaataaatgcatatattgcatttatatgcacatttatccaaataaagttttatttggatttgagtaacttgctcttccactgactttcacaggatgcctgcaaactatcctgtgaatgggctaagagcacaagatttagagtgagcaaatctggttctaatccttgttatgctcctagaagcagtgcaattttaggcagcttacttaaactttctaattaccacttccctgactggtaaagggagctgatggttatagctccattgttgataaatcaatgaaataacattgcaaagttatattacagtgtcagcatctagtgtaagcactcatcaaatagcatctattcttatttgatatgagccatttaaatgtaacatttaccaaggataagtattttagattgaaaatggttataatgatgggattttttttttctggtcgttgtatttcaggaaggaactcttaggtcatcatttttggcccctgggaatacctgcttcataactttcctatgcccaaatcttagcactgtttatgctgtagaactcagccctttggaatacttccttgcattcttggatcaataacaaattccaactaaggaaaattctgactttttttttttttttgagacagagtctcgctctgtcgcccaggctagggtgcagtgatcccagctcactgcagcctctgcctcctaggttcaagccaatctcctacctcccgagtagctgggattacaggcgtgcgccaccacacccagctaatttttgtatttttagcagagacggggtttcaccatgttggccatgctggtcatgaaccccctgacctcaggtgatccgcacacctcggccccccgaagtgctgggattacagacgtgagccaccacacctagccctaattctggatttgtatacacatagtcttaatgcataccttcatgcagagatgtgtgagacccctgcttatgtgtctcagtttctacaattgctccagttgtcttaatgcctttactagctccctttttacccacaggtaaggccaaaagtgcactggtaaagtccctgtgattaccctcaggggctttgttgttacagccctactttaagccacttgtccctgttttacatgtctagagattatccactcttcaggagaccattcctgctaattcccactgttgggcatttgaaagcatgctcatttaaacatcagtaactaggagtcttcattggcctcatgctgcttaattcctaacctggtcttgaccccagagtcaaagccctgtgaaaagtcaatacaagcagcaaacaatggtatgttattcttggccgactttgcaaaacaatgaaagagttcaacaatagttaattatggcttaatagttgctaacaagtattgagtgttaataaagtggcaggcaatgtgcacacattctctcatttgattcacataacaaccaaatgaggtaggcactgtcattatccccattttacagggaagaaagtgtggtttacaggggacaaactatttaatctgaggcctcaagccagcaacagtgttgcatgtcagccattcccggagtctgtgtgctcccccacatagaatacttgcctgagaaacacagaccttcagtgcattatggaggaagccattgtgaagtttttgaaggaatgtctaacagtgaataagtctgtagttattaacagaatcgctctgttagaatggagtagattacgcttctaaagactatcctgatggggatagagcctgaggaccaaattaaagcaaacaggttagcaacatcaaaaccaactcatcacaatagggggagaaaagactggcagcaaagggatatcatctagtcacattagtgatgatgtttaatacatagtccatacgagaagtattatcaggtcttgagaagtagcttcttagagaggcttacgattgacaaaatggaaggcgacacacctgccagtgtatgcctgtgaaaaatcagccttctaggcccagctagaatatgtatttccacaggatctctgactggacacattcagcatgaaaccgtggtcacagaatttacccccattaaggattctaacagctcagtctgaggcttcccacagaaatcattgcatttgagtatcttttatggaggcaaattaaaataagaaaaaaaattggtaagttacttagtggtctggttgccttgccttcttaggaaaggttttcttttttattttgcttctgcacccccaacccccaccctctgccttgtgaatacttatccaaccaaaagcctgtagccaaaaggctgagatccacatttacccaaacagttttggttattacatatctgaggaagggaagaaattctccccttaactttttgaggcaattaaaatgtagcttcagaaaattattatgagattgaagagtcccttcactccaccttagccatttttttttaagagattgggcctagctccatcacccaggctggagtgcagtgatgtgatcatagctcactgtagccttgaactcttgggctcaagcgatcctccatgcctccatgccaccataactggctaatatttcctttaaattttgttagagatgggagtctccctatgttgctcaggctggtctcaaacttctggcctcaagcgatcctcctgcctcagtctccatgagtagctgggattataggcatgagtcaccatgcctggccacctttgccttttatcctagtctcaccaaagtctaagtaaggatagaaatagattcagggactgtgaatgtcaaggtttaggtgtgaaggtgaaaaggtccgaaatatttattacaaatgatagggacaggaggcagagaaattctgggagggcaggtccctggtgagggccccactctcaagctgaaaagcctgataccacagcccaaagtgagaactgacagccctgttttcctgcttgaatgttgccttttccaaaaccacccatggtccaccctgcccaccatccagtgcccatagaaacctcaggctcaaccagcagagagaggagaagcagctgggcttcggagaatatagttgaacatcggagagaagtggtttgacttcagagggacagcttgatagtgtagctttggagaggagtccggccagggatgggaatatcctgcttcacaaagatggtggcaatgaaggagcagtggttatataggctaaagcagtggcttctcacagtgaagatatggaagtgaaattctcaataaactagctctgtacactgccaggcagtaatacctggcacacgaagtgctcaatgaatgcttgctaggtaaataaattgattttgacagtgtctgagctggccaagcttttcagctgaatcttaaaggatgagcttggcaagtggagaggggatgggttcaaatcaaagcatatgcaaaggcacctggggtgaggaagaccttcaagttcttgtccaggcagttaggtgggcagtggtaccattgataaaaaaagatggcagatggaggaggaggtgtcagtcaaattaataacaagcatatggccgggcgcggtggctcacgcctgtaatcccagcactttgggaggccgaggcgggtggatcatgaggtcaggagatcgagaccatcctggctaacaaggtgaaaccccgtctctactaaaaatacaaaaaattagccgggcgcggtggcgggcgcctgtagtcccagctactcgggaggctgaggcaggagaatggcgtgaacccgggaagcggagcttgcagtgagccgagattgcgccactgcagtccgcagtccggcctgggtgacagagcgagactccgtctcaaaaaaataaataaataaataaaaaataacaagcatatgctattttgccacaagttggggaaattaatgtttaagagactggtacatcatgacaagtgttactgtctaaagttgcccttctccatattgacacaacttacatcattctacagtcttttttattggtgcattctttgactttcctagagcccatcttttaattttgtcatttagcacaatgggatattatttactaaagattgagatgatcatgagagaaccatccaaaatcagaaactttatttcaaatttatttattatcaccttcctgtaatagctaggctgtcactttatttaatttcttgctaaaacctatgtgttattgtgtcaacattttgtagatgcagaaacaaaagcattaaaataaagcatcactcaaggatgtgcagggcaaattaagagatggtcgcagcagagaggcagagagtgaagactataataataaggttgcccaacccaaagttgtaaaaactgaacatatgagaccctgaattggaaaatgacatgcctgagagtcatggcccaggtgcgtgcaattgagaacaagtatgtctctagagaagagaggaaagcaaaatggctgtttgataaatgaagtcaatgtttctcaaaatgtgagttttctaaaatgagcatttcccaaaatgtacatttttcaaattttaaatctttagagattcacaatgcatactggcaatgagagactctgagaataccggcaacaaagaaaactatttaacttcatttaacccaatgtggatcaaactaatttgaccttggaatgcatttttcatggaacatctattaccacctcccaggaaagtgtgggaaacactgagttaaaaaacgaatgtttaatttggtagatgatcaataaatgcttatttttgaatttttatgagtaattttctaatgaaatctgtatctgttgtcaacagttgttcaaaaatggatgtaaaaaagtgaagtagccatgaccttcagaatgagaagaaaaccttagaagtaggaggaatatggctttactaacatccactaaaataatgcaaaaatgtctaccatttggcttggccaacccagggataaattattccctcaatttttgtagcatgtagttcctctgaaactgctaattctgcttagatgccttctgactgtaagcgaagtttaattatttcattttctttaatagcagagggttggtaaattgtttaagaggaacaaacaatgtcttgttacataggtggaaggatgcagagtcctggtgtgctcctggtgacatgactgtcaaggcatatgaaagtcgatattaacaaaaaatagagctaatgattcatataacaccatttttcactttacattgaaatgtgttgggtttgtagaatgagaatatatgtgattattgggcatactccagttcaaattttggcttcattacttgtagctctgtaatcataagtctctgtgcttccgttttgtatttgtaaaacggcatcgatagtgttgaatagtgtagaataaaggcctcctcattttgactcttagaaatctccaggagagcatagctcatcatcatcctaccctgaagcaaaatatcctagcagacatgccccaccccatcccactcacagttctaaaggagagaggtcagagccaaaacatagacctgctaacagtaagcacgtgaaacacagtcacttaatcccactcccttagatagaaatgcaaagccaaggaaccaccaggcacataaagagaatggcagcatgaaagaagaagaaacaagaatgccttcccccctgaaaaaaatgacaaccgaggaacagaagacaacattaaaagtgctctaattaatatgccagggggatttgggagaaaatattacactcttaaaagcagaacacaatgctaagaaaaagaaacaaagaataaaagagagtgttcacaggtttaaaacagggactaattacattttaaaaatttaaaatatttggaaaataagcccaagaactctctttcctctctcagaatgtagggagagaaagacaaaggaatcgaaaactatgagagagatccttgaagatgcgtctaggagatttaacatacaaggctggagttgaaaaaaattatcaaagaaatacttgaagaaaaaatttccaaagctgaaggacaaaattcttcagacttaaaagggtttcctgagtgcacagaacaattagtgaaaagaaagcttgcctaggcacagctttgatgtgtcagagtaccaaggataaaaacaaacatctaaaggcttttatacccagccagatatcaatcaagtgtgaaggcagaataatggtattttcagaaagaaagatctcagaaagtttattttttatacatccttttttaaagggtattatagacatattccagaaaaacaagactgagataggaagttgtgggctccagcaaattgtggttccaatccagacccctgatagcagttagaagaaatttacaacatggcaattgcattgctgacatagagggcagccagtacaggtggagcagaaggggggagatgggggggtgtatcaggtcttcaggaaaagggacttaaaaaaatgacttggggaaaattaatcaagggcaactaatgcaagaaaacaacatcagctggaaactctgaaaatcaggtggatgaatgtataataaacctgaatgtataataaggtcataattcatatatgaagcaaactaaaatgtggcaaaattagagcataaagacagagagaaattccactgaatcatgattctgggaaccttgatcagcccaggggtcatgaccttaagacatattaaaaagaacacattcctaatacatgacttcatcagtcaatgacagaatcatagcaacttggttgcaatttcaacacaaaaacaaaaggtaaacatgtatctggaaatgggacatgaatggtggggatagaacgtggagaagaggagagggccatcaataactttatcttttaaagtgggaaataaagagacatattgttgaaagttgataaaatgagaaatggagatttagcataacaccttacattacaacaataaacacaagaagaacagagataaaaatgcaaatgtcagaccctggcaatgtccaagattctgggaggagaggggtggtattatggagctatatcctcaattttcatattatggagtctgtaaatatcatctattattgacagattaaaaaaaaatagaggtataagcatgttgtctatgtgaaggcaagaccagaagaatagagaatggaaaaatggaaacaagctcgcagagtggggcccatgcctgtctcatttgttcaacgttgtatccctagagcctagaatggttgggtgccgggaatacctgcttaatgaatgcatgaaaagaagttcaccctgggcaatggtactggaggtgaagagaagggccaggggctgttgctttccaacactgagtagttgcagatggaggtattattttggttaaaaaaaaaatctgtaattgtgaaaactatggaagaatgaggcatgctgtaaagggggtggtcaccttggggaggggaatgtaggaagaactctggaggaggagccagccaaggaaggagaggaggtgttcccagctgaggaaatagtgtggagactccaagtggaaggaagacagatccagctggctggagcacagcagggggtgggtgacaggctccgcgtgagcctggggaggtaggcaggggccaggtttacacaggcatggtaggccacattcaggatgctgatgaactgctcaagaaatgctctgtgcacacacttgggaccagggtgccatggcattctgttcttaactgatcaggaatggcctggacctttggatttgatgtatgggatctaattactttgagcaaccaaaaaaagagaagaaaatgctacctattagataactgaataaatagagcgtggccaacttctcacacccatcctgtgcttattgcatgaggcgaatgagatgtgctgggaatgccggggaaatggctggattttctcctcaccaaggtgttgctacttgtcaggaagttgtgacactggtttagcacggaggcagagaaacacgatcaggacaatttaggcattgatcagtggcaaagcatgttctgttcgagaagccagaggagtgtttactgggctctcaggagcatgaggccgggccagctgccaaggataattgtaaagatatgggctctattctgaagaagtgcccattcttagaagacagaaatagatgtggatgcacacagatccagattctcacagagcacaaatgctgcacggggattaggcttggtgctctgggaagctgaattaactcttccaacccactagggtccttgttagtgcatcgaagcagtaatttactcaatgacaagagttcacgtcgctttctaaggcacttaacttactcccaggatgttggttgcacaccaggggaatctggctcactaatctttaatacttgtcataattatttttctttcaataatactatttcccccttgagaaactcaaaattattacataagaaatgtagaaatataagtgtgtgatattttttaataaaatgtagtcagtggccccagggaatttttgtagcaaaagcctctcaaatcaattatgttttctcatttctgtttccaataattgaatattttatttctatatttatttaagttctttcaaaatgaaaaggtggagttgtgttgacacactgggaaaggagggtattattaattaaacttgtttaaagtctaagatggaaacagtgctgatgcatatacatttgcttcaatgagctgttggctgctctgtgaggttacagaaatattattggcagttgcgggtggtggcaccattatatgcatcattccatcctctctgggaggtccctggtggtggccctccaagaggcatcattccatcatctctaggaggtaactctgcaatcacagttcatccagtcagagaaaaaatgaccgaggctcccctaggtgtttagtgtccatgactcagcggtttagaaaatccaggattacggactgcatttgtctcattttaatctggatgttcagtcctgctccctccctctgtcacttcaactggccctcactgtcatgtgcctccattgtctcatctgattctaacattcctgctgtgatgtgggtgggggtgaaggtcattcccctttcataggtaaggaacacaaggttcagaaaggttgaggacatttgcccagggtcacaaggctgcttggtgtcggagtcagaactagcctggggtggggaaatggggtcttctggttccttgcggtcacttcctgtggagtccctgacctccggtcctgttttgcctgacctctcagcttcaactgctcttccatgccactgctgcacaaatgctctgaatgtttgaataaacaacccctgagaagagtagcccaaggaagtccctgcccagagactgatgagttgttacccagaggcctggagagctcccaggatggcagacactgcctgcaggagttggcattcatcagaaaacagttcttcacggagtaggtagatcttcaaccctgtctggctagctccctttctaagctggaggtgtcagaggcgtgtgaaccagagcaactccatcttgaataggagctgggtaaatgaggctgaaatctactgggctgcattcccagacatttaaggcattctaattcacaggatgagatgggaggtcagcacaagatacaggtcctaaagacgttgctgataaaacagattgcagtaaagaagccggctaaatcccaccaaaaccaagatggccatgagagtgacctctgatcgtcctcactgctacactcccaccagcaccatgacagtttacaaatgccatggcaacatcaggaagttactctatatcatctaaaaatgggaggcacgaataatccaccccttgtttagcgtatcatccagaaatagccataaaaatgggcaaccagcagccctcggggctgctctgtctatggagtagccattcgtttattccttcacgtttttaataaacttgttttcacttgactctgtgaactcgccctgaattctttcttgcgtgagatccaagaccccctctcttggagtctggatcgggaccactttcctgtaacagaggctcctttaaaacaggtatggataataccacccctagttctctctctttcctctagcccagcctcatggggaaacctctccagaggcctctgattttttctgtggttggttaaggaagaccagagtgacctactcaaggaagttaatttcagaggtcaagcaatgactttcccagagtctgcctcttcaaactcatgccactggagattaataaacgttggttattgttatttggccccaaggaggctttgaatgcggagaattgcgacctgcatgcctaggtcaaccccatagccttagatcgagccactgtgacaccagaaggtgaaatgggacacaagggtagaaattacaaagaggctgccttcagtttgaaataaaggactttcaagtaattagaactctttcaaaaaggaatggccctgtcaaaaggtttcgttgccagaagtagttaaagagttgttgactacatgtctaagtgtgctgggaagggagaggatggttagaatagatgacctctaaggtctcagcacggagatatttaatttgtatatccttcctgtggacacatttctgtgtcctggagtacacagggagggagtggggtcagaggtcagggccaatggtcagggggctccagagcatctgcctctggacacaacacaggcccacagctcataggcctggctaccttctcagttcccctggtttcatcaacattgtcaccattgactgggttagcagcagcaaccgcttaacgtaactaaaatatctattctgatgagattctggaacaaaaatcccaaatgacttttcccctcgaatcataggaaactgcagcagagatatcactgtatcacttgaatgtgtacctgcttgccagttactccggattgatgcttcccgatgtaaacaatggctgatcgtaaggtctaaatcatatgtgtgaaactttctgcaaaacaaaagcgattgggtatttaggcaaaaacatcagtttagtagtttccctggcaaatgtcctataactctgtgtgtgtgtgtgtgtgtgtgtgtgtgtgtgtgtatacatattcatgtataaaacagtttgctttacaagcaagtaatggtcaggtcattctgctgggcaatttactctctaggaacccaaaggggcctgtgttacatgcatgcttttttacaggttactcagagccatttagaaaattactattgtgcttcacaaaatgccccaccagcctgaggaattaaccctcttcccaatacgtctaattcacttgttcttcaggtaatcggcacattaaagctgatgcagatccagtgtctatataataaaaacagctaatttttactgagcgcttagcatgttcccggaactctaaatgaattggatacagcttcaataaatcctcacaacaacccagatgagagttccattattgtccccattttaactgaagagtaaattgagactcagagagaaaagtaatttgctcatggtcacatagcttctagtgcctggcatgtatgaggcctgcaatgagtgatgattaatattattttatagtgggaggcacagttgggatttcagtccaggtctaacactcaatgaagcctttacacgtggcctctatgtagtcctgcctcatagaattcatattgtgcatgaaaaggaggcatgccatggccaagtgctgccagcgggaatccctgtcctaagggaggcatattgtgtatgtcacactttcagtagctccctgtcagttgacagcgtgtggcacgtaaagcagaatgattgagataggagtctccaaactcaggtaggatgcgtgaagtttccagaagttcatgaatacattcagtgttagtgcaaactatggctaggttcatagcttgcagatgtcatccttcctaaaactgatgtgcccgagaatgctctgcaggcaaggctccatgccagctccacgtttctgcaccccaggtttctgccagaccagatactcacctcatctgggcctgtcctctgcgcaaaagtaagagacacccgctctgaagagtgcaccccatgggcacagggctcgatgagatgccaatgcatttgtgagaattagaaaacagatttccctttctctgagcaagagaagtgtgggctggattttagtctccatccacgggctcagccgtgtgcccacaggcacatcactgcctgcccaaatcttatagcagtgcgttgcctaagtaataaaagcccctgggcaccaaaggggcagtttcaaatactgatttccaggaagcttcggagtatggagtttcctgtagttcttttaggaggtttgtgagcaaaatcactggctgcagtgtgggttgatgagatcactgggctgccatcgcaggtccctggggcatgagctacctccaggacagccccacagagacagccccacagagacagagacactagcagtaccacaggcttctcagctgagatgacagagggcacctgctaggccagaaggttaaccactcactcttcatttccaaacaaagatagtcaagcatctcttaaagtacaaaaatataactgcaggccagacaacaataaagattgaataatagactcataaaattaatggtcagaaactccatagcaatattttcagctccacgtttctctagccccagattataaacaccatacttaaaacaacaaaaaagatgcactcaactttccagccactgcttaagaacggggcagcttactaatcctgggaaacttacacctggggacaaagtttattattggtttaaccaaactgagaaagtgctggtttagtctctctatggtactttctcatcccttaagctacttgaatgagtatgattttcaggttagtattaatgatatgatgtgagtgcagttttcgtgggagaggctgccttttaatataggtttctcaagaattaaagaacttctgcagcaccctctccattatatatatgagtcaaatgttgatataaagcagtgttgccaccaaagactaccacacaccccagggatctagggatgaatgagtgaaagaataaataaactttttttaaatttttttatttttattttttttagaggcagagtcttgctctgttgcccaggctggagtgcagtggtgcagtctcagctcactgcaacctctgcctcccgggttcaagtgattctcctgcctcagcctcccgaggagctgggattataggcatgtaccaccacacccggctaatttttgtatttttagtagagacggggtttcaccatgttgggtaggctggtcttgaactcctgacctcaagttatccacctgcctcagcttcctaaagtgctgggattacaggcgtggataaacatttttaaagttccatctgtgtgtcatacatggcattagaagataatagtaatgttaaaagctaatgtttgttgagcacccactatatcctagaccttgttctaagaagggttcatatctttgctcattgaatctgccatccccttttacagaacaggtaactggctcaccctcactcagccaggacataaaggagtcagggtgggatggagtgcctgccttgaggggtacattgctcccagctccgagggaggaccggcccgccacacactccacctcctttggcagaacatttttagttccacatcttggagaattggttccccatctaaacccacaggttgtacctaggattctgctgttgaaattgaaggatgcctcagttagacaggaggaataagttcaggagatccatcgtacagcatggtgactatacttaagaacaatgtgttatatgcttgaaaattgcttagagagtagattccaagtatcctcacaacacacacaaaataagtaaatgacaagtaatacatatgaatacatatgttaaatggcttgatttagccatcccacaatgtatacctatatcaaagcatcatgctatgtgccataaatatacacatttttgtcaatcagaaaataactctagaaacaacaaaacaaagccaacactactaaaaagacaaagaatgtagttaagtcttttttctgcttaatcaagagaaagatcaataagatataataacttaatgaagagagaaaaaagaaaaagactagagaaatttagaaaagtttcttgaaaaacaaagggtgcggtatcttttttcctcttcatcctcagctttagttgaaaattaagtgaagtataaggcagtatacatacactaatgccaagtgaataaccagactctcgctgtccactatggtaaccactaaccacatgtgactgctgagcatttgaatcatagctaatctaatttgaagacttagtactcaaaaaaatgttaaatatctcatttcctgtttttatattgattacacattgaaatgataatattttttcttgttttggattaagtaaaatatattattaaaaattttaaaaaattgaatgatgctggccttttcaaatttgaaagaagaaattaggtcaatgggttgggttttctcaatgttctgtttttgttttttttttttagatacggggttttgctttgtcttgcaggctggagtgcagaggtgtgatcagctcacggcagcttcgaactcttggggctcaagtgatccttccacctcagcctcccaacagctgggattacaggcatgcactaccatacctggctctcatattttaaaagactatattgctgtctgggtgcggtggctcacacctgtaatctcagcactttaggaggttgaggtgggaggatcacttgagcccaggagttggaggctgcagtgaactgtgatcaccactgcactccagcctgggtgacagagccagaccctgtctctaaaaaataaaataaaatatgagaagtaaaaacaattaaaaaaaaacaccctgcactcatccacaattccatcactggaaatattcactttaatgtttgaaaatgtatctcctagtatgtatgtttcgttgtttgttttttaaccagagtgcagtcatactacacatactacttttttttttcttttagaggcagggtttcacagtgtagttcaggctggagtgcagtggccactcacaggcatgatcatagtgacttacagcctggaactcctggactcaagcaatcttcctttctcagcctcccagctggaattacaggcacatgccactgtgcctggctctcatgtactactttttatccaactttttttcacttaataaaataggccgggcacagtggctcatgcctgtaatcccagcactttgggaggctgaggtgggcagatcatgaggtcaggagatcgagaccatcctggctaacacggtgaaaacctgtctctactaaacatacacaaaaattacccaggcatggtggcggacgcctgtagtcccagcttctggggaggctgaggcaggagaatggcatgcacctgggaggcggagcttgcagtgagctgagatcgcgccactgcactccagcctgggtgacagagcgagactctgtctcaaaaaaataaataaaataaaataacaataataatataaaggggccatctttatatttcaaaagaaatatatatcaggattttacatgactgcatagtatttcactggactaatatggtacaatttgctcaagccactctctatctttggaaatgtagcttgtttcctcatttttgctatgatgaaacacattatgataaatatctttgcacatacacccatcaggagaaatatctagtttttaaggcttttgacagctactacaggggattacccacaggaaagtttgtaccaacatgaattcatataagccttgtataaaaatatgcattttccaacactaatactagcattaaaatttcatcaatattattgtatttcaatgtgtagctttggtttactaataaagtaaaatttttcttcccaactgcttattaggcatctgtattttttttctgaatttatttgacagagctccttatatatgaaggatagtaagctgtcattatatattgaagtatttttccaggtttgccattcatctttttatgtttttgtggcattttcgacagagtcaaagctatctttattttcatttatactttatttatttggtatcaggcttacaaaaaactatcatcccaagatcatttaatctttacctgaatttttccctagcaattttacagctttattatctcacatgacgatccttttagaatttattttgatttaatacactaggtttgcatctagcttttactctcctctccaccacccatagcagttagacagcgtctcaatatcatttactgaaaagttatccaatcgttcatttattcagtaaacagtttatctaagacccataggaccaggcattgttctaggtccttgggatacaagaaggaactttcattctaatggaaacagcagataatggcaactaaatatatatggtaaatggagctaaatgcagtgaacagggagaggctggctattttatacaaggtggtcagggaagctctctctgaaatggtggcattgggcagagacctaaagggagtgagaggtgacctatgcatctggggaagagctccaaggtgctaggccatgacataggagtgttcaagaaatgatgaagagaccactctactggagcagtaccacaaataagggagagagcaccagaacagttcagaggggtgacaggagccagatcatgtagcccctgataggtcacagtgaagaccttggattttgcactgggtgagggtagtggattgtatttcccaaagatggccacagcagtgtgtgtgagatcttttgcaatgtgacattgtcacgcctccctcaggaggtggaacctattcctcaacctctttgagtcttagcaggcctggtgactgcttttgtcaatagaagacgggataaaggctgctgtgtattttaggagcaactcttaactgctgtggcagcttctgcttcctgcctcttagaaaccaatcacaatgcaaaaagtgcaaccaccaaaacatggccattctgtgagaagcccaaggcacagggagagcctgggagaatgagatgccacatgaagagagagagcgcccaaggagctccaaggcaccagacgtgtgagtggaaggggatcctcctgctcagccagcccagacaaccaaatacccagattcatgacccatgacatcttgagcaaatgcggaaggttgttttgagccaccatggtttagggtagttggttatgcggcaagggacaactggaactgtgaaatagggacccataggagagttctgagcagtcatatattttgacttaagtgttataagaattcctccagctctgcgctaagaacagtgtgaaggagggagagtgtggaaagaagattactttggagagcaggggagagaccataggatctaggaccagggaggcagaggctaaagtgctaagaagcaattcaattctggatgatttcaaagaacacacagatgggatttgctgatggattagctatgggttgtgaaggaaagaagtgaaggatggcttcaaggtcctaggctgacactggaagaatgaaggggcttcgtggggatgtgagaaaactgtgggaggaacagggctggagttagagaaattagcaattctgcttcggacatgttaagacgtaaggttgaacacacattcaaaaggagagactgagtgttgtgcgagagctgggtctgtagttgggaaagaagtcagggctgggagatgtaagtttgggcatcgttggtgtttcagtggtcacagtggaccagatcatctgggagcgaatgcagataaagcagggccatcgggggactggggcgcttcaccacccggagatgtgggagaggtggagaaggcacccaaaagggaggccgagaaggcgcggccagtgtggtaggaagagaggaagagaatgatgatctgggaggcagaggaggaaggtttccagaaggaagaagtgaatgtgtcaaatcagctgaagaatcaagtcaaatgaagactgacaattctcactatgactgtcctcattcttgaaattactgatttgaaaaggggcttttcccatattctaaatggacacatgtgggagtgtgtgtgcactttcacactttcccttctcccccattgatctgtttatccatttggagctatgtgaccgctgaagcttttgtatctgacaaaacaagtagcacacttcctctttttctcatctttttttcaaaagtatcctggttattcttatctaaaattaatttgaaatttgacatttgaattttatcaagtcctctccctccccaaatgcattggaattttaatttaatcttttaaaataaaaattggtttcctgagagttgatattgagttttctatgtggtatatgtttccatttatgtatgttttacatcgctaagtagattttatagattctttttatataggtcttgtggtgtttcctcttaaattcttttctaggtatttaacttttgatgccttttatgaattgcatcccatttccccattgcattttcttactgacctttttctttttgccataaggaatctatttatatataaagaattctattattttgaattattttactgctgatacaaacagattgcaacacctttattattttcaccgcgtgggatcccacatgtatgaagttatataaccgatgtataaggctgtcctaatctctgctagtaaaatcgttcctagtttggaggatgggatttaatatgacaggatttcatggtgtttcccaaagaacttcatgatttccaggtgctctgggaatgactgtagccacacatctcagaatgtcccagatattcccaatttcaaagatttttccctttgttaacccatgagtcagaccatatgtcctttgatctttgcttcaaaaaatattgccatggtatttagaaacagggacagcccaggcaaagttgtaacacatgggatgtttttcctctgagcccctaacttacccctcagtactcttcctggttatgtgtgcctggtgcgtgcatgtgtgcacgtgcacacgtgcatacacacacacacacacacacacagacacacagaggcatcctggaggaaagggattttattcaaatacaaccacatgaactgcctgtacagcctagactcaggatcgccctaagggagttggcatggaagatttcagagctgggcagactgggcggggacctctcatctgtgtttcctgagggtcacctagcctctttgagcctccgttctccataggtgaaaggagtgtatcatatctgccttgcaggggtgttgtgggactcagaagatgtccataacatctatgcccagtgtagagtaggaactgggaaataatatccattactgtgattttgtgaggagttccagataactgctcaggtctttaagagaattccttggtcttcatactccactcccagctgtggaagcaaagcaatcagaatgaggatgcaggaagcatggggtggccatctgccagttctcccttttgtatgcctatttctgcaaacaaacccaccaacgattagattgcccatgataacaagccagcctccactcagagctcaccgtgcaatgactgtgtggaagacatttgtgatttttttgctgtcaccaccaactatcttcccttcctgttaccaccgcagtcttccttctggggatgcctcaccatgcatagatgtgggagataggccggaagtctaatggagggtctacctttcctcaaggggcaagcatgtgatctaaacaggggtcatcactctctcccctctttctgggattttaaataagtgacatcccaatatggggacaattgaggtcatatctgtcactgtggcagccacatcatgtggcccagactgttgccacatttccattcctgtggttcttaacggtgttcttacctttgcttgctgctctattttaagtcaatcagcccccaatattgttctgctagattgacattttgttcagcatagcctgattcagtttctgtcttttgcaacaggagcactatctgatacaaccagactccaagaggaaaatagaaaaagggagctcataccacttaaaaagatttctctttactgtggtcatcatccagggcttgggagaaaggtgaaatcttaaaagataccagtaggccgggtgcagtggctcatgcctgtaatcccagcagtttgggaggccaacggggggcgcatcacctgaggtcaggagttcgagacaagcctggccaatatggtgaaaccccatctctactaaaaatacaaaaattagccaggcgtgacggtgggcgcctgtaatcccagctcctcaggagactgaggcaggaaaatcacttgaacccaggaggcggaggctgcagtgagccgaaatcatggcactgctctccagcctgggtaacagagcaagactctgtctcaaaaaaaaaaaaaaaaagacaccactaaatgggacacaacaactgagttgaagttatgcatcattacattagagaggatttgggggtagaatgcctttctgtttgccaatttatcatcaaaggggcaagaggatgaagggcggaagggaagtggtgaatatcaacttatacaaccaccactcaaacacaaactctttgcatgcttttaggagaacttgaaacaatttcaattttcaggatggggaaaagtaaaagccctatttgccctttctctcttcattatccatggtctccacattgctccttggtcctgagaaagctgccacaaagcattttactagttatctgattgtcattccatttaacatgtcccctggtctgctggctgatggtagtttaagcaggatctaattggtaacatattgccgattgaattaagtgccatatgatagagatttaaaccatggtaatttttccataaagaaaaatctgtcaacaggctataggggaggaacagcaataaatcaaattgtcgtgtttattagttattgcaggagtctagttgtcttgtattcattataaccccccatttttagtgcagataaaaactacaaagaggaatatctgtgcaagatgctttttaataggtttgtatttgtacacaaacacctgcttgtattttaatgatgagaacaatggtgccatttcactttgaaaggagcatgtatttttggctgttttctggatgaagaataatgtttttagtttttgtcaaagctatgttttaaaacattgagaatcaactcactaataaccaaaaaaaaggcaaatgaaagcagaaatgagatatgacttgtttgtcagacttggaaatactaaaagaacagataggatgattgcactaaaggatttctagaacagtcattgcaatttaacttgtgatattcaaaaaccggaaatcaactaaattttcatatatgggaatggttgcacaaattatggaacatcagctccagagggtgcaaatgggtcatttgaaagaacaagttaaatcatacctaatgacatgtcattaagaaccaacattatttatacttttcatttccatttaacttgcctttaccgaaggtggatttcaacacgttttccttacatgactcggaaataatataacagcattttacgtatgtagactcattgagccctcataaaatcctgtgaactctgtaggacaggacattacacccacttcacagaaaaagatgtggaagtgcagaagataaaagttatttatggaagggtccatagctgtcaaccttgataggcaagacatcaggtccttcctctgagtagtggtgtagaaaaaatggttggaatttagaaaccagcatccagctcctcaccatgccttcagctttctctgtgactttgaacttgtttcttaaactctctgaaactggacgtcctcactggtcacgttttgttactacttgctttgtattctgggtgtgatgggtgggggattgggacacagaatctggagatggtcagatcccaacgctgctatttccctgctctgcactcttaggctacctaccaatctctcctctaaaataagcataattgcaatggctcagatacaataacaaaatgtgtgtaaaatgccgagcaccacgtctcacacctgagaggcactgaatgcatgttatatactatcatttggatgtcaccgttccatgtgcctatttcctggtttgctgtacaagatgtgtatgagtacatgtcatcaagcccacagagctccagaacatgttcctctcacaagcaggcctcatagggaggggtgttctgtgctgttcctctttcctgctcactacttgtctgtagctacagtgtaaggactgtaatgtcactgctctggccttaagtgtcaccccccaaacccattttacacacaccacctcccacctttcacctttcccaaactcttaccatgtcccttcaagtttgatggcttaattgtacaaaaggtagtgatgatgatgatgatgatgatgacaatgataacagctgctaatacttactgagccctttcaatgttccaggcacttgtctaagcactttacatgtattagcttatttaattcttaagaggaagggattactatctactattgtacttgtgttacagatgtgggaactccgatgcagagatgtatagtgacttgcctaaaaccatcatgttagagtgggaatttaaaccttgaaatctggaaaataagcaatgtatatatttttctattttctaaatgcaaatcaaatatacatatgcataacaccactaaacactaagtgcagttacgcctagaacaagggaatagcagttgacagaaacacaaccaaaactaagaatattaaatgtctgtattactttcactgtaatcacttcacttcaacagtgagatgggatagccctaggtaaaggaaggtgctcttgtagttagaacattcttaaattttgcaccaaggaacacatgcttttaataatggcagagacaacattttttgatggattatttagtttgtacgatcaacattcaaagaatgagtttaccaccactttgttattgtaaacacttgacctttagctacctgaatgatcccctctttgaataaaaggaattatgaaacacatgtgtagacatatttcatttttatatatgtgagactcgaatagcaaggaaatcacatattaggaaaaaaacccctttgtcttgctattagttctctttggtttcaaaaatctggtcactgtgtatattgcattatatcatatgtgtgtgtacatatatatacacacataaacacacatacacacaatgtcatgtgtataaatacatgatgtgtttatgcacatacacagacacacacacacaaatacacacatatacaatgttccatccaagaaatacaaatatagtgctgttagcccctaacagtgaggaggtcattattccaagtcatttctgcagaagtgacggtggccttaggtggaactgcccatgatctctccttgcaagctcactcactggggccattgactgggatccagtctgtggccatgtcatggtttctatttttgaggttatagctaatgagcaacatgaggttaagacacacttttcataaggccccagccagcatcataaatatgtgtgtgagcatgttcacactcaggttatgtcttctttatgtgcaccctctaccacacacacacacacacatgcacacgcacacacactgacggcttcagtgaccaactttggtcacatcccatctcttccttctcaatccctctggctgttcaccagggcctggaccatctcggtgaggctgaccaagaatgctccccctgccctgaccagcggagcatgggcacagctacttagagcgccacccttcaggacacaaagtcggggctacctctcttccaggcaaggcatcctagagggcccgcacaccctccagtttgatcttacctctcagctcccgttccttttctttctctccccagtaagtcgttgaacgtctttcttctgaggctgagcgtggagctctcttctcgctggcgagctttctgaatggcactttctgtacaaacaggaagagcatgtgtggtcacaacccaagtgtgcaggtgttgatagaggatgtgaaagtgtggaggcgagtgactaaaccagatacccaaccggccaactctcacttgtggcagggcctggtctaccagaaggctggaagcaggaacctggactctactctggggagaccaactgacaaaagcagaggatggtggccctggaggccaagggagaaggtctctttgactcctgtgctttctaaccctatgcagacccataaaagaatcccaggaacattttggaatctcttagatatatgattatcaagaatgttgatttcaatgggctgcttaacttgtccaaagctctgctggtttcccaggctgtctgggcctccaagagatcaggaccaaaggctcatcctgcattggaactgtgacaagtcttccagacctttctagaacaaagctacaccaggaaagaagagtcttaggcaaggaatcagatgtcctaaggctgctctacatgacctacatgatgggtgttacctcctcatctcccattcagtcaacccacgggcactggacttcctgcccgacacccttccctctccccattcatgcctggaattattttcactaatgacaccagggattcactaatggatgctttttcagttcctgtcctatttgtctccactggcagtgtttgacttccctgtagtgttgaccatttctttcctcccagaacttctgcctgggccgccatgactccatactctcctggtttttgtcaggcggtctctcacactggcaggcttccattctttggtcttaattttcgccctcctgcaagctccactctccgcctcatggttcctgttctccatgggtggcctcttcccagctccagatggaacttgccaagcccacatccatagcatcacacatttctgctgttctcctggaacatcccccagcacctcccgtcagactcgccacaatgaaaccctgctctgtcctctaccccactcattacttaccatgtggcctgtgaattccctcctgccttgtcccagcttgctcctcaggtctctacccccttctgagtttaccaccttctgatctctcactttgcctctgctaatctggcttcttcaggtttgaccctccattatcctcatccaaacaggcccgtccttatcctgagaatggatacctagaaacttccccacccagtcctatcccaagccctgggaaattatcccagtattgtctgcctcatgtccctggcaaggagaaaacgtttctttatcttatacccaaaccagaaatggggaggcttcccacgttcttctctttgctgaatactcttcaaccttccatcaccaagccctgcccattctacctcttcagtcactcctcagatccttcttcccgtccgcatctccacagccacaccctccctccattgcctctcatcactgccct

SEQ ID NO: 17 - DNA, 640711 bp, Homo sapiens
  source 1..640711: mol_type = genomic DNA
tgtgtatgatattcaaagccataagacaggggcgatcacagcaaatagcaaagaaaagaggcctaaccataagccctggggccctccatatttagaggttaggggagtagaagaaaaccacaaaagggacagtgaagccagaaacacagcaggaagccctggtgagcactgggagaaggggtttccaggagcgcaagtgatcagctgctgctgataggtcaggtttggtgaggccacatgcctgcctcttggttactagagttacttatgcgtggacagcccgaggcatggagtgatgacctgtgcctaagtgtcaaggagaagacaagcaggtccggaatggtaaaaatgtcagcacatctttgggaagttgtggagcccagccagtaagccaacacggctggataccagggtgcttaggccatagcaaactgcatgtgagccggtgaaggctcagcaggctttaaacggggatgccggcccggctggctgagtttcagaaagaccacgccgatggctgggggcagggactcagccagtgtcctcaatccaggaccttgtgggaccgcccggcagccagtgcttccgcaaatctgaagggtcccatttgcctcaaagcggcgagacgagccttccaagcgctgctgcagtgcggtcccagctccgcggggggtccccggggatgacctaaatcggggattgcggtgggacagacggtccaggggctaaggaaccccgtggagcaggcagcggcgctcaggaggcagcagcttgagatccacggctcgatttttaaaaattgtaagggagaaggatgcctcgaaagcctctgtggtattttgtcgcatctcgcacccctgtctaaacttcagtccactcgtggagtgtggacccccacgccgcatgggctcaggaggcgcttcgcctttggaaagaaatcgcatgtattaagggaaagcacgtgtgctactttgagaaaggaggcagaaagttaccaaacgcgggaaggggaggctcgccaaccaagcgaggccgtgggacactggcgagtcgcagaggctcctggagccagccgcttggaaacaaacaacaacgcggcgggcgaactcccgggcagcctcccccgtgccggggcgcgggggccgccgcgagaacccgggcaggagctggcaggcgcggggcctggccggcgggagggtcccgcaccccggcccagtgtgaacaccccgcgcacccccctggcccggcccgccgggggcgcggactacaagtcccaggaagcccagaggcaggcgcggggcggggcctggcgcaattccccgggatccggcgcgctgggaagcgccgaggaggacgcagcgccggcggccggagggcggcaagcgcgcgggcaggcggggcgcgggcgcgggcgcgggcgagggcgaaggcgggggcggggccgacgtgggccggagccctgcgtgccagggagggggccggccgggcaggcggcgggcggcgctcggagcgggctccgcggcttgcaaggcgcctgcgactcggtcccaggtcggcgggcggcgcacggcgggctcgcgcgggggccccggcgcgccgggcggcgcagtacgcagcgcgcggacccacgccacggccaggagcccagagcagcgcggccacactgcccaggggtcggccctcggccccggcgctcggagcgcggcggctgcctgggctttaatggctgctccgcggagcagcgcctagggctggaaggcggctgcggctcaggaagtcacccgagcaagcctccttcggggccggccgcacccgccgcggcgcgctccatgggggcgcgctccccccgggcggcccgctgacccgggacgccggggcccgctcgctcgccggccgcgcgtcccggccatgaactgagcccgcgggccagccccgcgcctgctccgcccgcgcctttcttctcgcgcctcctccgcccgccgccggcgggcccggctccccgggggctgcggcgccccgggctcggcggcccgcgggccccggggcgcggggcggcggcggcggggggcgcgcggctccgggcgcggcgcctgcaccatgaactaccagcagcagctggccaactcggctgccatccgggccgagatccagcgcttcgagtcggtccaccccaacatctactccatctacgagctgctggagcgcgtggaggagccggtgctgcagaaccagatccgggagcacgtcatcgccatcgaaggtgagggccgggccgccttggggcctcgggaaggcacggacgcccgcggcgcggcgggggtgtgcgctgtgtgcgtgcgggtgtccacacacgccggccggggcacgcggctgctccgccgagggagcactgcggcgctgcttgtcttgcaaggccgggcgagcgtcgcctgcgccccgccgcgccgcgagctccgccaggaagatagatcgtcagcgttaatttgatcgtggacaatagagtctctcctgcgggaaagtggctcggtgcctccgcgtcctgggctgccggagcgtcccggcccagcagacgcctgggggcagccggcggggtcggcgccacccgacccctgacaggttaccaggccaggcctgggcgtcttgctggacgttgaagacgtgttctgagaagtgctgccgctgggggcgaggcccgggccggcgtgtttgggcggtgcagggctgccctccttagtgtgtttgcttaattcaggggtgcagttgaacttagtggatgccgagagccagccctagccgcgggagcatcgtgtccaggtgcccctgtgcaaacgctggaaccggtagtgtgctttgtaccaaccaaaagtccggggttggattagaggaagaaccctaccaggagggcagggcgtcctccagcggaagggtctcgctttcatatgtctgcagttggaggccactgaagtggagggtgctgtggttttaagaggggcaggatgcttgggcagaatccccacccgcttccctctgcatgtcaggcagggccatggccttccaggagagctacagcagcagtctgccttccggggctgtgccctctggatttctggtggctctcatttctctgtttccaggctgctgatttattttcttgcttcatccctttggtccggccaagactcacctggggcaccaggtggcatgtgcgtggacagtgtggagtcatatcttagccacagttgatcagcactttctcccttctcagcgctgttggccagtgatggtaaaaagcctgcagagtggcttgtccataatacagactggccggtaagacctctattgaggaacattgagaatggcccaaagccggcaggaatgtgcctgaaagcctggtgctggcgttgcccagcctcctccctctgtgagggagagggtatcagcccacagagaggctttgccttggcactatgtagtctgaactactaaccccgaagtgctttggtttgaaacttggccagttaggtggagaaagtggatgttgtgttgctgagcccttggcatttggcagccctgtagacttgaaccatgtcccagccaggctggatgactggcagactatacccttgggggacttgttaattccaggggaggatccgggtggagctccagccttatggggtcctagccctttgtgtgtatctgtctcccatgaggtcacctggctgccttgttggtgacttaagatgctctgtggattcctcaagagatgggctctgtctgcctctgcatgactcgtgatgagtggcggtgggacctggacccatctgctgatgatcaggtggtgttgcagcaaggttcctccagagctccagctctgcgtctgttacgggagctgtgaaggctgcacggtgctcatttcagatggttcttcctggctctctggctgcatccacagaagtctgatgaaacactgtgaaagccggcgtcaggtattgaaggcacctggctgagagcctcttttgctgcatgaagacctctggctgagtggggttcacaacacctcgtttttatttcccattcttgaagctgagctctggggctcaagcacttccagcaaagcagtttgactttctagcaagaggatgtggttgcattttcctttctcccttaaaagaaaaaaaaaatgcgtcgttcctagatgatggttttttttgacagcacgatgcctacctttgcgatttgagattttaggccccttcttggccgggatccttgtcatttttaataaggcttagaatcattgggtgaatcctgtttgggactggggtgatgctgttatttttctcttagaaatagggatgtctacattatgtggagctgtagttaatttagtgaggcttaagaaccactcagacatgctgctgttctttgcatgttcttctgttatcaataatgataccacttttcatttctgtagaactttaacagaaatatttttgcatgtatagtctcattgtgtggcttcaccaaccctgtgagggtgggtgggtagcttcctcatcctcattttatggaggagcgggtggaggttcagggagggataatgacctccttaacatttgactgaggtggtttgaagtctgatctgaaccaagggatcatttgaatggagtttctgtctccacactgcatgtggatggcaggaacccagtgctggcaactaagcctgcgctggaacatcacagtaactgcagagggctccctgcaggggcagagagctgcccctgcctgtgcgtgcaccttggaggttttaaagtctaactgtttccaatcaggacagcaggtgcacatcataacaaatggctcaaaaagtcacttgtcccaccaaatagaaagctggccacattttagaagatttccagctagggattttttccccttcctctgtatgtgcatacacagaattggggtctgacttcccaagcttctggactaccgtgatgtgggcacttctttttttgttttgagacggagtctcgctctgtcgcccaggctggagtgcagcggcgcaatctcggctcactgcaggctccgccccgggttcacgccattctcctgcctcagcctcccgagtagctgggactacaggcgcccaccacctcgcctggctaattttttctgtttttttagtagagacggggtttcattgtgttagccggtatggtctccgtctcctaacctcgtgatccacccaccttggcctcccaaagtgctgggattacaggtgtgagccaccgtgcccggccgggcacttcttaacgttatgaagagcttttgaagatagggtttctcttgttggcacaaaattcccacatttggctgcaccctactcaaaacttcactgttttctggcatcttcaggaatttttgctgttggagtgaggtgcagccttgtccaggggaaggatgttttggctaatgcttatttcagagcgcgtggaggtgggtctgggttgtaaaatctcttaacgatggactaaacatattttagttgaaaggcccaccaaggctcccaaataaaaacacatccgtaatcctgtttgtaggcatgggatacaggtgattttgccctcagtcttgttttaaaacactagcttgtcagaagagaacagtttttttcccccaatttttgttttgtacattgagaggtttattcccccctcccttcacccccaaatcactagagtttaaggaagcattgctgattgttccagatttatctgatcaggtttctgggatgtcctatggggcatggcatgctgtgaaatgtagccacacagctgtgtcgtctctggagcctccgcagccaccatgcccagaaatgagcctgagagccatctcgcctccagtctgaacagcgtgtgttagtttcccctctggttctccttagaaaagtccatcgggggttgatggcattgaggtagatgaattaactgcctttcttgttcaataaagcttgttcttctttcaaggataaagcctctcttagcagtcacacatcgtaattcagcttgccagcagcaggaccgtgatgtgagtgatagcccagccagctcattcagccaggcggcccgattcccaggttcccacgcatcgccgggaaggttggccttcctctgaggttgagccctcatccagcccacaagcctccatccccaccaggtggccgatgagaggaaacccaggctctccactggcctggcacttggcaggagaaccctgccctgcacttcttaagggcatttccacagggagattccaggaccccttagtagtatctcagccccagtgtttgggggacctgggaagatgggtcagggttccccactttgtcccatgatacagctgctctgttgagcatgtgtgtcccacagagtgcggagtgtctgaggtgcatcatctcagttcgtcctgcagcgatcttgtacacagacgcactgctgaggccagaaagcttaggacacttgtgcgagagcggtgagctgggcccgtccgacctcacctctggccctctgtcgccgtgtgagattgcggagcccctgttattcatacttcccataggccgtgtgtgcaaagcatcccaagcttgtttccgccacccaaggcaagagggtttgagaaggccccaaagaacctaaagtattctgttctctgtaaagcagctgactgtggcaaaacttccagaagcatttgttttcatgtggaaatgtatttagtccggttgatgcaggtgtgcatgtttagggaaacaaacattttcttcctgctgtggataagtgtcatgtttctttgtcaccattggccatgttcataatccttcaagttgaatgaaaggtggcaggtttgcagtcccctccttaaaaataacactcagttggcttttagttgcttccaggtgagctctcgtaccttgccggcacccgggacctccacaatgcgggcgttccttgtgagtccagcttactcatgcttctcagttgtggtgcaggtgctctttgagatgccgccttctctgcctgttgctcaccctgcgaggctcggtctctgttggtgtcactcatgaccagccttgcctcgccagaattaaggccctcctggtctctgcccaccgtgtttggctcatctacttaatcagctgggaggtctggaagctggttgagggcagaaatcagggcttgtttattgctgtatcctcagtggtttgatagatcacgtctggcccttgaaggatgcccaggggtttgttggctggctgacttgccagagggtcctttccaaagctccttcttggtaggataaacaatgtttatacgctgcagaagtgaggacaatttgaaacgtccccagagcacagaagttagggttagacaccttttggatttggtgggctggcttggtgggaactcagtgtcatgtggtgtttgggatggaagtgaaattttctttactgtaggtaggggaagcaaaagatttgcttgctaaatcttggcagctttttcagatcagctgtctacaacaggttggtgtttatgttgggtgtaagtgaatttcagacatagaatcaatattaagaggacaaatgggtgacagcctgtgtcactgccatgatatagtatctttggcgtcacaccgagagcaaacgtgagtgtgtgtcaggtcacattgagggctgatggaaacagattgccggcccctcccatacctcccgagtttctagttctgtgggtttggagcaggacgcacgaatgtgcctctctaagaagtgtcctgaggatgcggatgccctggtccagggaccgcacttctggaagcatagctgtaaaggaaaggcagctccagttgacttggtatcatctctgggccgttgtttcttcttccttgctgtgcttgtagccagctgagaaggtttcctatcagcctgccctgcaggtttcaggtgaagacacctaaggccagctgctcagggagttgcttgtggtcacgcaggctaagtgtggtggacgagggacttaaaccagatctgaatggtttcaagctggtgttcatgtgatcttcatgatgctgtttgaaaagcagctgaatgctgggtgaggggcctgtcgtgccagacccctttaaatttcattagggatggcaccgggttcaagagactggagaggagacctagagccagcaaacaaaagacagagggtttattaggggaatttatttacagagtggtcccatggcggcctgggcaggagaagcgctgctgcttgctttcagaaagcgtgcagtttatatagcattttcgcttaacaccctcccccaaacaaccaccacccagcaaccttaacaccaatcaaagagcctcaataccctgtatggcctgctttccatgggacaggctgggggtttagatgttcctcatagataaggaatgaatctctgggttggccactcccggattccttagctcagaaccccgaacatacattcaggtgcacctgccatgtggggccattctcagttattgctgtcaggggcatctgtcagtgggctgcgtttctgcgacacggtggcatgtcggatggacattgccaagagaatctggttaggaggtagaggcagctgatgtccatttccttctagactcattctgtggttttgcggattttccttcttgtctttcggagattgttgctttttaatgtagtcttatgtatatttagattgggttcttcagtattcacttattatatgataatttggcagatgacacattttgttaccaatatttccaagctgaaagcgcgtttctgtaaaagacaggagctagatgttactagtagcttaaaagagctgttggaggagcctgaaggaagtgactcataagggagagaagcagtgggggcagctgcaggaaccttcaaaacaaaacctgcagccctgttgctaccacctcttgttttttgcctaaaccaggcgttttattttgttaagacgaaaatcccttattttgcatccgtttttccccctgtataccctgcaggtgtttatagtttgtgagtctcactctggcttgttttaaccactgatttcgtttcgtcttatgtttctctacactctagcaaacctgtgtccccctccccgcccccatcccaatcctccagccttcacgtccttagcttaagtgattgagtctggcaaagcggatgaggcttagctatttttaaaatccagggtttgaggttctgatctggtgcttagctacataattccttccctttgttaagtacctttctccgagaaacaaaatgcactctacagatgttaatctctaatctttgcagcatctgttatttttattcaggggtacaagtgctttgtgtgtgctgcggtgagccctggccttctggaagctctgtgcttctgaggggctgagggggatttgggggtcccttttcatagtgtgggctgtctttcccaagatgcagtgatgacccatcagaggcagggttggtattgtccgtggggtccagtccctctatcttccagggcttttctggtcacaagagaccatggccagaagtgggtatcgtgcttgtgtctggggcctggggagggaaggaaaacaaataccaccccctgcagaagagatcgttaatggattctttgagtaaccagccagatagcttgtttgtgtgcgaggttgggacattttccgtaaagagcagactaaatataggctcgagggtggggaccagggcccgagagggggctgccactgcttgctccagtattgtttcttccattggtaaccagaacttgccaccagtcccaaacaggtggccaccctgagctctctgggaacagattggtgtttttgtttaaccaggggctcatttgcaaatttcacacttctcccgctgtttgatggggattgtctttttttgggctgcagtgttggagtatttgtacagtgtttctacacaagcaactgtctaatctttaaaactgctcatgccgtctggttgtcattagcatcatggttagaagctttttatttgcctttttttttttttttttttttaagggtgggaaaacacttttcatggttctgggagaagaatttcaaataatgtccatgttcacaaatgatttatgtttggtcttggagaaatgtcagcattcaacaggctctagtaaatacaaccatgttgatttccagcttaggacgaagctactgttaccctgttctcactcagataatagtctgaaaggcagaaccgtacctttagaaagtacatttagcttcaattcaataagttttagttttagccaatagtgacttgtagtatggaggatacttgaaagaaagaagttaaacattttttaaaaaatttatgaacacctgcaacaaatagccacaagacctacccttttttcaggaaagagttttcacttcttaaatgtcaccttgggggcatgcccactgtgtgatggtacccttcagcaggattggtattgtcggaagtgctggctagcttatgtaatgaaaaagaaattgatttggaaagagctgattgccctgaatttccatcctgtttgtgcgttgagctgcccttttcagtgggggagaatccagcatattttccagggagggcgtttccggaagcctgtctgcaccccctttgttgttgttttcgaaggtctggggtgctgctgtgagccgggatcgcgtatctgctcctgttctgacgagactgctcctgctggaagttcagcctggtgaacctgatttgggaggggatggtgtgattggcggggaacagcattgtgttaattttagcttcaacaatcaagcctgggtctctgagtgtccatgtagtacttgaagtttgggtttggaattggtgggattgagaccacttcaaactcttttatttcttggaacttgttagtatttatttatttattttttgagacagggtctcactctgttgcttaggctgaagtgcagtggcactattggggctcatttgtagcctcaacctcccagactcaagtaatcctcccacctcagcccccgccaagtagctgggactccagatgtgcaccatgcctggctaattcattggattttcagtagagacggggtttcaccatgttgcctgggctggtcttgacattctggactcaagcaatccacctgcctcagcctcccagagtgctgggattacaggcatgagccactgtgcctggcctagtttttaatttttgagacagtctctgtcaatcaggctgaagtacagtggcacgatcgtggctcactgaagccttgctttcctgaagcgatcctcctgccttggcctcccaaatagctgggaccacaggcacgcaccaccatgcccgactaattttttaattttttttgtagagatggggtctcgctatgttgccttggcctccctaagtcttaggtttacaggcttgagccaccacgcccagcctcgaactctcttttttttttgacacataacagagaaaggtgcccaagtcataaaggagaaagttttcacaaactgatcacatgtgggaccagcatccagttcagtggccagcacagactcatctgtcgtgagggtcgttagaaattgtagcccccatttattggtctcttctgcctgtgatatgtgcttgagtggttgcctgtttcgggggctgtcagtgtttgagtggctgcctgtttcgggggctgtcagtgtttgagtggctgcctgtttcgggggctgtcagtgtttgagtggctgcctgtttcgggggctgtcagtgtgtgagtggttgcctgtttcgggggctgtcagtgtttgagtggctgcctgtttcgggggctgtcagtgtttgagtggctgcctgttttggggctgtcatgaatagcaccactgtgcagattctcacttgccttttggtgcccatatggcctcatttctgtcgggtgtgtgctgggctgtgtctttctctctgtgggttggacgtagctgctcgtgaagccgctcctgcagcccagcagcccctatctgggaaacctttcagtgctttcaaggttcattttatgacactcaggatggccgtttgtctccttttgctgattttcattctttcagttgtttgttcataaacaaatgtttgcatggctaatgcatttccagcacttagagattaggtttttaaacttttggattgtctgcaggctattaattccttgttagttgaataatgacggctgtgtgcatggagctgtgtgagcgaaatccctcaccaggaagagggcgcagttcctctgggactggaacaggggcccctttggctctccttggctcctggcagaagtcagttgtcaactgggggactctttctggctgagccccaagcagcctcaatccatccctgtgctgggttttagataacccactggatctgtgttggtctttgaaagggaattcactctgtatgtttggcctaaactgtgttatggccttcatagttacgtattagcattattcagtttttgttgtttgtagcaattatgctgaagacacaaaagaagaaaaaaagctaagtgttgccaactcaaggagtaattttctttgttccagcgctgtgtcctgggagctgcccatccccctccacaaaggccagtgctaaacaaggccagagccaggaaggacacgcggggccatggattgagtgagggcagtgtgtgcgtgtgtggatttctctggtggctttgcaatggcaaatatttattttgagggatggtggtgggaggaccaagtttatactcactttgtttagtaggggaagtggctaatgtgagaatcaatagacaagattttatcaagcctctgcactgggcagagcgcagtttttgaagctgggagaacaggcagatgtgtgggacactcagggcccttcagatctcccccaggagccactgatacaggtagagatcgcagccacacaaggctgtgtgggaggggcctgggagatggggcggagtccagggagagatcctggaagccaggtagcagtcaggagggctttccaggctagtgggtactaggattggagcatccagaacagagtcacttcagcctgggaagagcggggtaggcggccgaatgataagtgatccttgacagcccccgagagcaggctgggagaccttttgttggacggtctactactgattatggatcctgcttggagaggggagtgctttttttaaaattcttttctttttttttttttttttttaagacggaatcttgctctgtcgcccaggctggagtgcagtggtgtgatctcagctcactgcagcctttgcctcccaggttcaagtgattcgcctgcctcagcctcctgagtagcggggactacaggcatgcaccaccacacccaactaatttttatgtttttagtagagatagggtttcaccacgttggccaggccggtctcaaactcctgacctcaggtgatctacccgccttggcctcccaaagtgctgggattacaggcatgagccactgtgcccggccctgttttatttatttatttatttagctcgggtttcaatattttaaaaaatttgaagccaggtgcggtggctaatgcttgtaatctcagcgcttcgggaggccgaagtgggaggattgcttgaggccaggagtttgagaccagcctaggcacagtggcaagtgcctttagtcctagctacttgagtggctgaggcaggaggatcacttgagccaaggagttgcaggctgcagtgagctatgattgcatcactgcgctccaccctgggtgccagagtgagatcttgtctcaaaaaaaaaaaaaattgaactgtgatgactatgatattgtcttttggggggttttctggacataaaattcagaattttacatagaaacttgaatttatttgtccaagagtttcttgttttgaaaataggatgccactgggaacattcttggttaggagccaccggaagccgggtctgtatgggcagggccagtgagatgcaaagccacacacgaaagctaagcacacactcttgttttcctcactcacatccatgttcatcctctttcctgtgctgacggtttgcaaagctgggagagaatgagggcggggcctcgggaagtgaatggcagagcaggtggcatagacacctcagccgtctgcccacagggtatgggcaaggtttgttttggtgactttttcttccagtcttgtgtacattatcgtctctcacaggacttgagcttggagggagctggagtggccgcttgctgagtctttctccctggagctcgtgggcagctggttacctcgcgctggggcgaccctgacttaggacctcctgccgtttctctgggtgactgctctgtagtcgtgagtcgtctctttaatgctgagcatcagtacctgcacagccctgaatggagcagctgcccagaatctgtcttgtcatcgatagatggacagttgccgagtgtcctgcgtgccgactgactaaggagtttttgtctctgtcaccctgtcccctgtggttttatgaagacgttagttatgaatccgtgtttaggatgagaagatgtaaacagtgaggaggataagtgagaagctagcaagagtctggatggtgatggcgggggagcgctggtggaggagtcgggggcgtcccgctggactggggcacagctctgcagcagcagccggtgcggttttgccttgtaagtgacaccgttgcctgcaggcatctctgacagctgctcctgctccagattccagaaatttctatggaacatttcctgaaccatcctcctggtttcttcccttcccctcactgaataaaatccgtaatagcacctgccgcttgagtgtttgtctctgcaggacgccgtgttcagggctgggtgccctttgtgtcattttgttatcctggtcactgccagacagaggtggtaggaccctcatttgtcaggtcaggagcctgcagcctggagagtttaaagccttgcctgaatccacccacttctgaaggtggcagagtcaggattcgaactcgggacccgtggacaccagccacctatgggcctttatttttatatttttaaaaacttttagtttcaggggtacacatgcaggtgtgttatataggtaagttgggtgtcatggtggtctggtgtacagattattacaacgcatagtaagtacagtacctgataggtagtttttcagtcctttccctcccaccctccaccctcaagcaggccttggtggccgttgttccattctttgtgtcaatgttgagctcaagtgagaccatgagatatttggttttctgttcctccgctggttcgcttatgatattggcctccagctccatccattttgctgcacagggcgtgatctcattctttttattatggctgcatagtactccacagtgtacatgtaccacattttctttattcagcccatcgatgggcattttggttgattccatgtctttgctattgtgaatagtgccacagtgaacacacaactaactgcgtgtgtctttatatagacacaatagaacaattatattccttcaggtgtgtaccaagtaatgccacctacagttttgatgttttagtaaagtagaaaaggaaacttcagaaatcagcccataagtctgcagaagtacttggggaattctctccgcagttcgcagctctcctgcagatctcggtttgtgatttgaaactcacattcacgctcggttttttactcatcaaggttataaagaaaataacagctgttggttcacttttattccctcgctgagagttggtggcggctgggatgctgactgacggttttgattacatgaggaggaggcacggaggcaagctgactgcctgcgattacaggtcccgaagtccgggaggagggaggatttccaaacggcatgcctttgaaaattcacctgcgtttaggaaatctgcagcacctttaatcctggctagctgaaaatacagcttacatttaagccacacaaattctgtgacattttaataatggagatgttagtgggcagttaactttttatacatgtaaatagaagttactttccccctgtgctgtaattagcaaaagagggagaaagggatgctctgtgcatcaaagcgatttgcccagggttacacagaggaaggtggcagagccggaagtggcagaatccagtgcacgggcgggatgccgagtgtgtcgccaaactccaccactttagtcgggggcgtggtggtggctgcgctatctgcttcccactcactggcatcctagccgtgtggggtgtgtgctcacctgcagccaccctcacctgcttgaaccagatttacctagagggtggtgtgaactcatgtgatgtgaacgattacttatagttaccgtgaaaattaatggtgggttttatagttggaatgctttttctacacttacttgatttttgtctatctgtttagagaagtgttttttctgttgttgttgttttttaaacttgagatggagtctggctctgtcacccaggctggagtgcagtggtgcgatctctgctcactgtaacctctgcctcccaggttcctgggttcaagcaattctccttcctcagcctcttgagtaactgggattacagacatccacaaccacgcccggctaatttttgtatttttagtagagacggtttcaccatgttggccaggctggtctcgaactcctgacctcaagtgatccaccctcctcagcctcccaaaatgttgggattacaggtgtgagccaccacgcccggccagaggtgtggtttacataaagtaaactccaactcttgaaagtttaccatttgatgagttttgacccctgtagctacaactgaggtatggaaggcaaccattccccgaccccaacacttcctcatgcccgtttgcaacctgcatcacctctgtccgtctgcttgcacccatctgctgtctgtcactgtggattagtttgcattttccagaataaaatagaaataagatcatgcattaaaaagggggtccccagcctctgggccatggaccagtactgggcctattaggaaccaggccacacagcaggaggtgagtgacgggccagcaagtgaagcttcatctgtatttacagccactccctttgccttgtgttaccccctgagctccacttcctgtcagatcagcggcggcattagattctcataagcgcacaaaccctgctgtgaacagcacatatgagggatctagatttggcgctccttatgagactctgatgcctgatgatctgtcactgtctcctgtcccccccagctgggaccctctagttgcaggaaaacaagctcagggctcccactgattctacgttatggtgagttgtagaatttttttcattatatattacaatgcagtaatgatagaaataaggtgcacaataaatgtaatgcatttgaatcatcatgaaaccatccccctgcctcccttcagtgggaaaattgtcttccacgaaaccggtccctgatgccaagaaggttagggaccactgcagtaaaggaccccttctttgactggcttcattcagtcagcatgatgatttttagggtcattcaagttgttacatatatccatagctttttctttttcattgctgagtaatgttccattgtatggatttactacagtgtttttatcctgtggatggatattgatggagttgtttccagttcttggcttttacaaatagaggtgctgtgaacattcacgtgcaagtcttcatatgggcacgtgctttcatttctcttgggtagatacctaggagtggagtggctgggagatgtgctgggtatataattaacttttatgtaaactgcctgctgttttccaaattggttgattttactctcccgccggcagtgtgagagtgtccactttgggcttaagttcagcaggcttctggcagtgatgggatagcagctgtccttaagaaagagcatttgccctctgtgtctcttgggctgtgaagtgtcttgtactgatgaggggggtgggaggctataggagtgaggctgaggagggaaaggagaagcctcagaaagaggtgcagactgaagaccaccttagaaggtcgcaaaatccaagggagcagagccagtgtgcctctccttgtgacctctggcctcagtttccctgtctgtaaatccggatgtttggccaagatcagttttcaacaaggtgctgggtgggggggcggggggcggcggtgtatggcgtgcaagcattgtagcccccaagaggacatttggccatgtctggggcaattttcggtttgttacaactttggggtgtcatggttgttactggcacgtggcaggtggaggtgagggatgctgcccaagatcccgcaatgcctggggcagccctgagtcttcgtcatcccgagactgagagccccaggtcagatgagctctgtgaccccctcagcctctgatccacactcaccaaggattactctggtgcacgattctgtttcggtgggagctggtgtaattatctagaggtgtgtctacctgtgtgcccagaggggcccgccctctcggtgagcaaggacacctggttccctggggtctgagccaggccctcagggaggggggcagccaggagccgcagggggctcagccagctcctggccctcaagtgttctaggaaaccggcttctctgtggggatgtgactctccctcactcctcccattgcctgagtaggcaaattccacctagctctttatgactaactgcctggcagcctgagctcagggcagttcctaacgaacttctttgattattaacctatgctgggcccagggaaattactcacttgttttctggccaagagaaaatctcctggaaacttctatatataaatctttttgacaattccgcattcaagagagttcccctggcagttcttctatttgtagggtggggagaaaaacccatgtaatttccccaaactgtggattttgttcctatagaacatgcttgtgagattcagtgtgcgtatttgtgtgagtgtgtgtgaatgtgtgtgtgaatgtatgagtgtggatgtgtgtgaatgtgtgtgtgtatgtgaatgtgtgtgaatgtgagtgtgaatgagtatgtggatgtgtgtgaatgtgtgaatgtgtatgtgtgggtgtgaatgtgtgtgtaaaggtgattgtgagtgtgtgaatgcgtgtgtgaatgcgtgtgtgactgtgtgaatgtgtgaggtgtgaatgtgtgtgaatggatgtgtgtgtgaatgcgtatgtgtgaatgtgaatgcgtgtgtgaatgtgtgtgtgtgtgaatgtgtgtgtgtgtggtgatggtcattgtccacattggtggtcttgtcactcacttcttgatctgttgctgcatcagcagaatgctgggcagatggctgcatcttgtttgggagtttgggagttttctttgagtatctgttttttaactttcaggggagaataccaaggttgggaaacactggttttgctgacataagaataagaaaattggccaggtgcattggctcacacctgtgatcccaacactttgggagaccgaagtgggaggattgcttgaagctaggagttcaagaccagcctgggtaacatagggagacccccatctctacgaaaaaacaaaacacccaggtgtgttggtgctgcctatggtcccagctgctcaggaggctgaggtgagaggattgcttgagcctaggaggttgaggctgcagtgagccatgattgcaccactaccctccaacctgggcaacagagtgagaccctatcattaaaaatcagtcaatcaatcaatcagtcaatccatgcgcgtcctcccccattcctgccttgatttccctgttaggatttgccatggggtgggcagctgggcaaaggcatctgagctggaggtaggtgataagctccctgggcctcccaccctgcctgcctctgctcagtggctcctgggtccctcctgaccatgtaacctttgcgccagccagagaatctgccctttgccttcctctccaggaagttgttgagatacatgagtgaaaatattattcttttaagtgctttggatgttataaaaaatacactgtgccattaatgctcgtgcagggctcccggccggcctaggccctctgcacttgagattcctctggcagcatctgtttagaactgggcactcctggttctggtcaagtttatcctgaccagttcatttcatggcagttctggtcatttttgagaaaatctagtttgcactttcattgggcccctttgtgttttctagttcagatgtggcttctctagctttttcttgctgctaaatggtcttaaaggtttgagatcagtgtctcagactttagcctgcgtcaggatcacctcaggtcacgttttaactgagggtgggttaaaatgcagatcactgtgccgggcgcgggtggctcatgcctgtaatcccaacactttgggaggctgaggcgggcagattgcttgaagtcaggagttagagaccagcatggccaacatggtgaaaccccgtctctactaaaaatacaaaaattagccagtagtggtggcaggcgcctataatcccagctatttgggaggttgaggcaggagaatcccttgaacccaggaggcagaggtcgcagcgaactgagatcgcgccactgtactccagcctgggcggcagagcaagactccgtctcagaaaaaaaaaaaaaaaaaaaaaaaaagaaatgcagatcactgggctccacccccagaagttctgattcagtgggtggcgggtgaggcctgggaacttcatgacgagccccctggcaaggctgctgctgccattttggtgccacactttgggtactatggctttgggcactcccaatccaggtgccatggcatggggagcagtgggtgaaccaaatcctggagcctggactgttccattgggtgcatttctggctggcagatagaggaccacccagctgtgcttgatggggtctagaagcattgaaactggtttgccgttatgatgtccatgaggttggagtcctttcttagttaaaaaatctgaagacccaacaacacacagcacccccacgctgaaccctcccgagaatgattgagctcttccaaataaagggcgattttgtagcttttcaagttttaacagtttgataactcccaggctcctgttgagatgctttgtgatgaggttgtgcgttcccctgtatctttcctgtgggtgtttatgtgtacagaacacatgtatctgtatttacgtgactgagcacaggcgatttccccgagtctcaccttggtgtgtgccagtgcatgcgcgtgcgcgcgcgcacacacacacacacacacacatacctcctctcagagaatgttgatgtggcaattcatgtttgacagctgggttaacccataaatagatcccaaaatataaatttacccagacctcaacctgcttaagcctttaaatagctcactagggcttttagaatgaagttgaaattccttggcctcacccttaagcctttttagaaggagtcatggaggaagtaaagaaatggaaatggagttgcctcgctgggctcccaggccctttgccgtggccctgcctgctctccagcctggtctcaccccacctgtggcaccttcgctgtggaggataccgtcagccaggctcacagttcctggcaggccacttcctctgtctggggccctgcctgggggtttggatcacctgagtcctgccccttggcaagcctcttttaacccacctgatgccttcacaacccagctcaggagtcctgcttccccaaggccattccgatggctcctgctggcgattccagggcctgccacctggtggcctgtgcactttgctgtgacgtgggctgcacgtctctccccagcatgggctcaaggtgctcaggaaccaaaccccggtgtctcatccaggactggacacgtggtgagagctccatggagcttaactgcatgagggaggcgggatggactctggcttgtagggcacagtctgtgtagcaacaaggaacatacctggtgtttagatcagatgttcaatgactcatgtcccagagaaggggcctgcagccgtattggtcagttggggagcttgtatactcaggccattgaggttgccatggccaccattttgggaatcttttctttgggagttgccatcagaatttagggcattaaaaaagtccttaaatttaggtaatgtttgccttaagcagatggtctttgccttttagaactgtcagaacttgtttacccttcaagctgggcactgtggtaagttgactctttgggtccttggttggaaacatgagaatcccattctggctgactcaagcagacatggattttattcgaaggatgtgggggtggctttgagcatagaggcgttgggatggactgaaccatgggcccaggggacaggcacaggctgcctgtgtatttagggcactgcttgggttgcctggagagtggtttattggcccagattctgccacttcttggccaggggaggcctttcatggacagcctcatcagagtggcagcagagagaagagcagggcaggtcctcaaaggaacactgaaaaggttctctgaaagacaggggcgtagatactgagctggcaataacagcgctgatccactggaatggggaagggcctcgagctgttctgtcaacacggagttgtttgtcaggcgtcatgggtatcattttgtgcatctgcccttgttcagtgtttccttgtaattttgcggaaaaaagtctgcttagtgttgaaccagacattctgcagcctttaaaagagaatggaaatggagagattgtaatgtgttcattggtgacttttgacacggatgctaacctgtaagatgtgcagatatatcatgtgcaaactgttaagatgctgtcaacattttgaatgacttcttgcaaatagtaaggaaattaaacacgcacagagctgggcaaatgctagaggatggtgttgccttttgcatcttggtgggaaagagatatttaagggggtgaggggagctcagcaacagcgacttaagggcctgctaggagcggggagaagttggttgctggggtgtgcggcctctgtagcccagtcctccgagtatcgtgacaggtggctgggtgcctcagtgctcaggtatgggctcctgttcctgccgcatgggctcctctgctgctgctgctgctgctgctgctgctgctgctgctggcccgccagttcccatggactctccctcacctgtgcttccttctgctccccgacttcatggttggaacgtgctgtcttcccatccctctgggcacgtggctcctcttttacatgcatgcctggcgaatagtatatccccagtaaatgcttgcagaatgaatgtctttcctgaatgttctgctctgctccccagcccccagaaataaaacagaaatgctgtactccttccctgtctcaggcccaggagcattattattattttttttaaatctcttgtggcacttttctactttctcctccacagtacagctgcttgttgagaggcagtatatgtcatgtctaagaagagtcctcaagtgaagtctggtgcagcttctttctagctgtgtgctttcaggaaagccttttgaatttggagcctctgtttcctctagctttactccaaaggaaacaagtgtaagtgcttggcacctgcagcctgagcgtagttcatgccgcccgtattcctggccagcctccgttctctgggacccggcaggaatgtgtttgtcgcctctggccctgtgcaccctggcttcccatcatacctggagaccctgggacaaatgcctgtggagtggatgagtgagtgcatgcgggtccactcagctccccggcaggcttcagaatcttccctgtattctggaagtaagtggcgtcgctgcccagtttaggagagtgccatgtgggactctgttccatcagctgggttggtgcagtgggactgaactttcttctttggttgccctctgcaaacagccatgcagatgttattgatgggcagttgcaggtagaagcatttttggccctacagggtagatctgccagcatggcaggctgatcagccacgggtgccacgtggctctggaggggcttggcgcctacgttagtcagctcgggctgccacgacaaaataccacagactgggaggcccaaacgtattttctcacagttctggaggttgagagtccatgatcaaggcactggcaggtttggcttcttcccattctgtgcctcacctggtcttttccgtgtgtgtggtcttcagtgtttttccgttctcaggaggacaccagtcttgttggatgagggtcccacccttaagctgccatattaccatgattgcctccttaaagaccttatctccagcgacagtcaccttggggtgtgagcctctgcagaggaatttgggggatactgcgcagtccgtacagcatccctccctccctggtggtttctgaggatttgtcactgatgtagtagcatcacgagtgtttcgtcacttaacccagagcagggctttgacgacatagctgtgcccaacgtagatctttatggtaattttattttaattgaggtcgcagggactaatttttactggaaagaagtagcagccatgaggcaggagatcctctttactttgtaaaaaaatgtaaaagaacttgtttagatcaaagtcatgtttttaaaatataaactagattatgaaaaaaattaaaacttgatttaaaaagaagcctgggccagatgcagtggctcacacctgtaatcccagcactctgggaggccgaggcagacagatcacttgaggtcaggagttcgagaccagcctggccaacatggtgaaaccccgtttctactaaaaatacaaaaattagtcagacatggtggcgtgtgcctgtaaccccagctacacgggaggctgaggcaggagaatctcttgaacccgggaagtgttggagtgagccaagattgtgcctctgcactccagcctgggtgacagagtgagactccgtttcaaaaaaaaaaaaaaagaaaaaaaaaaggtagaactcatagttgccattgaggtctgagtcccggcttgcctcagttggggttcttgcccccatttgcaggtgagaggtggaagctcaggcaggcccagcctccgaaggtgcagcgcagggaccctaacctgagagctggaaatgctttcttagagaaagtgcataagggctgtgcccatctctcctttgcccgaagacgactgttctgctgcattggtttcactgtgttgtttctgtaactctggtgtttaatccacgtgaagacagtggagctgtttacactgtttgattgattggatgcttatcaggaatctcaaaacccagctttgggcaaccagatgcctttgacttctctttctcctccactgacagtgatctctgaatgcttttataaaggtttttcataaagaatataaaaagtgacagaaataaaattggcaatcaaccaaattccttacctctcaaattgcctcttctgagactttttgtgatgatgcgtgtgccccaccctgcaattggtttcatagaaattccttggatttcctctgtttctgacaaagagccagggcggaagctgcaggtcactgggtgccagctgtttcccaccgtcagccttgggaggggcacggagctttgcaaatgtctcttcagctggtgttttctgccataggacaaagagaaaggagagtgacatggtgttttgaatattttagtaagaaaacagtctccacctgcacacaaacaaaaaaaattaatgcttggatataacttttttaatcctcaaagtaataataactttctatctcataagccagagggatggtggcatagctaacagcagctgcatgtcctcaggttaaacttcacatcttgactggcaggcttgcctcgcgggtgcacttcgtgaatgcccgctgctcctgcagcggaagagtctcctgtccttgggcctcagtggcaggggcagcaacaggaggctgcggccagttggcttcacactgtttgggaacagcagaagggtcagagcagacctcaacattatctgaaacgagtactattcacaacagcaatttgcaggttatgtgacaagaatcatatcatttggtgtgtgtgtatgtgtttatttatgagacagggtctcactctgttgcccagggtggagtacagtgccacaatcgtagctcaccataacctcaaactcctgggctcaagcaatcctcccacctcagcctcccaggtagctaggactacaggcgcacaccaccacacctggctaattctttattatttttgtagagacaggcagggtcttgctgtgttgcccaggctggtcttgaatgcctcaagtgatcctcccactatggcctcccgagttgctggggttacagtcatgagccaccgcacatggccctagtttatatttattaattggtttaatcctcccaggaatttgaagatataattcctgatatataggtgtcagaatttgagactaagagtattgagtgataattcatttctcacctctctggaagaaggtgtaataagcatagaaaatacagaattttctatatactgatataacacatattttcttgtgtgtatgtgtatatgtgttgtgtgtgcatagtgaacaaaggcagaagaaacatttaggcttgaattttttgagctaagtattattttctagagcttaccaaaaaatccaaacacacatatatgtatgtagaataagcgtaatgatctcctgtgtaccctcaaccagcttcagtaattagttcatcctgtatataccctgccacctaccaatattattattatcattatttatttttttgagacggagtcttgctcttgtggcccaggctcgagtgcaatggcatgatctcagttcactgcaacctccacctcctgggttcaagcgattctcctgcctcagcctcctgagtagctgggattacaggtgcccaccaccacacctggctaatttttttgtatttttaatagggatggggtttcaccatgtccaggctggtttcgaactactgacctcaggtgattcgcctgcctcggcctcccaatgtgctgggattataggcatgagccaccaggcccggcctcaatattattttgaagtgaattccagacaccctgccatttcatccgtaaatacttcagtatctatctctaaaagatgaaaacttaaagcacacatgaccacattaccacactttagaaaatgaacagttccttaatatggtcaaatatccagtctgtgcccacatttccagttgtctcatgattaccataacttttcccttcagtttgcctgttggaatcaggatcaaatactgtgtgcacgttgcagttggtggagacttcttctgaaactcctccaatgagtaggttccatgaccgtctttctctccttcccggggcctgtgtttgtttcgaatgcctccccttggagtcagtcagcgtgctcctttgtctcctgtattttcctataaattagtgggtgtttggaggcttgtttaggtttttagcttttgtttggtttggttggactcctttctgggcgggtctgtgtggttcatcaggaggatcccaccttctatttgtccttttgcccacgttagcagtcgggaccagttagctcgtcagaggttgcaaaatgatgattttataattctctcattattttttttgctgttatttgtttaagatgagataattctatgaagagtacctttcgggtcatgtaggaaaggcaagataaccctctttatttactaatcgtaaaaataacaagttttggtttagtagactccgtttaaaattgactaattagttttagatcattgtgaactctctggattaaatgtacatggtgcattgcggtgaaagctgttatggatgctccagtgatcccatcttctgcgtgtggaagcatttcaggaagccttctgtgttctcttgacatgacattgaccacttcctggatttctgatgtcacaggaaagataaagatggacagatgccccaggctcatgtggtacattggtcatctctctagcagtcacggttctcagggacacgaacataattcctcatttgctttgggcttccccatacaattctcagaagacagctccagcagagcttccaacagtgtgaccaccagaatgagttcaacgtgctgcaaattgcttttcctctttagggtgtatctcactttcggtgataaactccagttattgtgttttaaatcacatggaattggtcttctctgtgactcttctatcctggtggaggtgtacttagatacatttctttattttcaatttttagggaaatagttatataactagttaacatatttgtgtggaaccaatgtcacatcatcaaaataaattctaagagtcctggctttgattcttaaagataaattcaaagactctctctttgtcactttttcaccttgtcgtcttctcttcacctataactattttttaataagtattgtttatacttgtctcttttaaatataagcaaatacatgcgaatgggtacttatataacctcctgcttggatacaggtagcttcccatgcactgtttttcgtttgcctttttaacttaggaacatgttctggaaaccactccatagtgtgggctccagaacaggcctcattgtgaaactgttcccaatttattaacaggtctcttattaatagacgttgggatcgatccagtttcttgtttttgtttgttatatatatgtgtgtgtgtgtgtgtgtgtgtgtgtgtgtgtgtgtgttgctattgaaaaatagtgctgtatagtctacgtctatctttttcttatttcttgtcaatgtatttttgggatagatgcctagaaaggaggattgctaagtcaaaagggtaatgtgcatgtagtttcgctaaaggttgccaaattcccatccataataagtgtgccaccagcaatatacgtgagtgcctctttcccaacagggtgctgtcaaactattggatgtttgccagagaggcacagcttggtttttgaatacatcggatgtaatcaggatgtgcagtctttttggttcctagaggctgactgggctctgagaagcatagaacatttcctcaagaggcttagagtctgtttaggggtgatgaggcttcctggcagttccttaaacgtcagtaaacattgttcgtgtgcccgacctgggccaggctctgttagaagctggagctgtggacagggagtccagatggactggtgagaatgtcacgtcggttgaggatttgaataggccactggttttggtaaaaaggtggtaaggagtgggcacattggacttagacctcctgggcttctgtctgtaccagctctgaggtacctctcctccgtaagacgctcagcctctctgtatctgtggggtcttgataataccaatctcatggttcataggaggcgtgatggtggtgatggtggaagtgaggaaggagaggacgcaagagaatgggagacaccctggagaagccaagctggggagggaaggaagacggctcatgaggaaggccaggtttttggttgggagagacttgagcttgatgagtgtttggacaatactggccctgatgagggagcgattgcagggacggggtgatgccgatgaagaggctggccacaaggcagaggggaggctgaaagttgtgtgaagatggctgagtgggaaagacaagcaagatgggagtaagggaggatgtcttggcctttgtgcctgagcctgttttctctgcaaggctggaaagctgacctttatggtgatatctgtttggtactgttagagcgatttgtcctgcatttctgggcaacctgtgggcagaagaggagaaggatagatccttctgatatctcctgggtttggcagttggcatggtggatgtcatgtgggtgacatgccaccaggatgtcttagctggggctactgtagcaaaacacctaagactgagtggcttcaacaatagtcgtttatgtctcgcagttctggcggttgggagtccaagatgagggagccagtgagggcaggctccggtgagggctctcttcctggcttacacacggctgccttctcgctgtggcctctcatggtggagagagagagagaaaggctggtctcttcctcttcctgtaaggacactgatcccatcatgctcctcacggccatgacctcatctaaacctgatcacctcccagaggccccacttcctcatgacatcacagtggggtttagggcttcagcatacagattcagggggacacatgcattcagcccataacagggtgagggtgcagttcttcagctggagccccaggaggctcttggggagaaaatgtttccttccctgtggggatctaggctttgctcacctgtgctgcatggtgattgttgtgaattttgaaagggactgcttcccatcggtgcctgagtcaaggcctaggacttgatggatggtgcctggcagggtcagctgcttggtgcaggttcctgtgcccatgtcatggtacgtgctgtccgctaagctccctcccagcccttagtggtcctcactgtgaaaagctgattttgagtaaggctttatcccacccagggatgaaatggcaggtgttaccagtcagggagtggggtgggaatgggtgtctgcaggggaggctgcacagacatggcggggggtggtggccagtggtcaggtggccttgggtcgaaaggccgactgaccaccgtgtgacctggccagggtgtgggattgcatctgcttccctgcccttccagtgggagtgaccctgcttggacgtagcagggggacggtggtcttggattgaatggctcactcaccaccctgtgacctgaccagggtatgggattgcagcgtgcctcctcatccctccagtagggatgaccctgcacggatgaggccgggggcggtggccttgggttgaatggcccactcaccaccctgtgacctggccagggtgtgggattgtgcccggcttccccatccttccagtggggatgacgacaggcatttgctgagttccatgggactgtggaaagggctgtgtcactgtagacgctccatcggaaatgctgatgtgtattcttaccacgggcgtccgtgggccaccattgtctcctggcatctggctgtccttggaacccagcaacacccagggacttgggctgtgatcagaagtcctgcccagagcgagtagggtcacgccagagtgaggctggggacagcatggtccactgtggcccagatgtaacttttagtcctgccttcttatccggtttggcaggaacaggacagggtggttagcaggccacagtgtggtgggagtgaaagtgtactgtcctgtgtgatatttttgcacagcctgacagtgggggcaagtttagagcctttgagctgagaatctggagagagcagtggatgcgatgggcagttgcttgtccttgctgtgagaagacaggccacggggctgcacccagcccccatgggtaagtataacccccaccccactactgcccgcccaccatgccttccccacatggatgagttgctccctcctataaagtaggaaaacatgcttaccgctggagaggatgcctaacaacagctcctgctgcccagcgaggaagggaccctgtgtccaagagaaaacctgatggcaggtaacacatcacccctctcttttagggacctcgtccctttcttttagggaactcattggcttgtcttggacccaaacataattagtgggggtaggggtgaggagagaaactcttcagtgaacagatgtcttcttgggccgattgttggatattgctcaccagctagttattaaattctagaaaaactaattctttgtgcagattctaggtaaaatgtctctgttgcaaaataggatttttcaattaagaaaagctttaaaatatatcatgtgttcctccttagtctgcagaatctgaatgtcaccttaaaatgtcagggttaaatttcttacggttagtacatgaggcaggcgtgaaatttacaacagaaaattgagattgattactttcatttactttctcttttttggggcagtaactgtttaatgttaaatttgtattgtatgtcggtgcctcttttgaaactggagatattgatatgatcttaagcaaatgtctccaatacgagaaaaagaggactgatttataaagtggaggactgacacataatgtggaggactgatacataatgtggaggactgatacataatgtggaggactgatacataatgtggaggactaatacataatgtggaggactgatacataatgtggaggactgatttataaagtagaggactgacacataatgtggaggactgatttataaagtagaggactgatacataatgtggaggactgatacataacgtggaggactgatacataacgtggaggactgatacataatgtggaggactgatacataatgtggaggactgatttataaagtagaggactgatttataaagtagaggactgatttataaagtagaggactgacacataatgtggaggactgatttataaagtagaggactgatttataaagtagaggactgacacataatgtggaggactgatttataaagtagaggactgatgcataatgtggaggactgatacataatgtggaggactgatacataatgtggaggactgatacataatgtggaggactgatttataaagtagaggactgatttataaagtagaggactgacacataatgtggaggactgatttataaagtagaggactgatgcataatgtggaggactgatacataatgtggaggactgatacataatgtggaggactgatttataaagtagaggactgatttataaagtagaggactgacacataatgtggaggactgatttataaagtagaggactgatgcataatgtggaggactgatacataatgtggaggactgatacataatgtggaggactgatacataatgtggaggactgatttataaagtagaggactgatttataaagtagaggactgacacataatgtggaggactgatttataaagtagaggactgatttataaagtagaggactgacacataatgtggaggactgatttataaagtagaggactgatttataatgtggaggactgagaggcagttggatctggatggctatttttcaaagtcaaggccactcagccagatgaatccagaggcatatctaggttctcttgattgacaggaacctgcagaccagctgtgctcttggtcctgtggccttccatgggagagggtatgggaagggctttggtgcaccacagatgtcttggcctgtctcttccgatgacttccctttgcttataactcacacctgtttacttggagactgtgaattagatttttagttttgcagcaggaaaatcatttgaaattatagactatccctcttgaaatctcattacataaaaagatttaacaagcctcttgtgaataagttagggtgacaaggaatgaattatttggagaagtaaaaaaaccttaaaaattaaaaaaagtttttacaagtaataagaactttacaaaattattgtgtgtattaatatcaaagggagatactgatgaggacctgaacaacatgggtgatgggtaaaaggtcattgccaccctgagtttggaaatttgaggtgctcgttgctactttgggttcagaatagttatgatttatgataaacctaaaaattaaaagtaccacagttttctctcaaatcgtatgtgggtgggttgtgtccagaaacaaataggaaagcttccacagatggaatgaaatagtggaacagatatggtggttttgttttggaaaggatttgtctccaaagttttggggtggaggcattctagtcttgtttttcttctgagatggaaacactggcaaacttggagtcttctgcaaaactgtatcaagcaaaagtgaaacagtagttgctgtgtgacaagttagtattttgtccatgacatgtagcaatcagtagaaatagataaaggatgggatattggaaaatcccctggagatgagaaacggtgggtgacatctgatgagaggaggaggattcagggagcagaatgaagacattggccaggcaagcatctcagtgtggaggtggggctgcttagacatttaaattgacctaaatcaagcagttattaataagtgggcaaaacaccggaaaaattgcactccattcctgtgcctgtcagggctgttctattatttggaaacagactttacttacttaccttattgattgagacagggtctcactctgttgcttaggctagagtgcagtggcacgatcatggctctctgtagcctcgacctcctaggttcaggtgatccccccaccatagcctcctgaatagctgggactacaggtgtgcaccatcatgcctggccaatttttattttattttattttttgcgtttttttgtagagacgaggtctcgctctgttgtcaggctggttttgaactcttttgcccaaaccatctgcctatcttagcgtcccgaagtgctggaattaccgtagtgagctgccgctcctggcctactttaaacatctataatttgtgttcgttgtaggattattcacggtagaaacagggtggaaaaaaatgcccacagcctagcatttcaaggtgcagtgttttagttcttgtgtctgtcattacagatgtgctttacctgctcccattcacaccttagaacagagaggctcctgtgtataaaggtatccgtaaagcctcatgccctgcatttcacatctagcaatatcataagtagagcatcttcaccaaattctgtctgtatcatcttgagtacacagatgtgtcataactagccacacttctttggacatgtaagtcgcttctcagttttcactattctcagcaatgcagtgaggatattttcatgataacctcattaggctctttgtgatgttgtcctggatctgtcaaaaattggtctgtcagaaatttgtttttaacaataatagctatattgttgcattaactccagaaagttttaccaatttaccctctaaggagaatagacctccttccccatcccccccacattcaggactttgcatctgagggggaacctggccacgtggttggcattcctgagccatgccaggctgctggagcgcacaaattctttcaccccagcaagcccggctccatccaccatctgtgcactcaggccccctccccctcccccgccccctcccctcccactggcggtttcatttttatttcttaggctttataaggatattgattatggacttttggctgatttcagatctagaattacagagtgagatggaaaaatgacagaaatgcagggaaaagtcgaagcacagtgtgtgggagttgcatatggcgagatgctcgagagattgtcattttccttaagtcagtgaaagattgtcttctcaataaatgatgtttgctccgcttgtttcatatagtagctgtaggagaccatacctctccagccttctcttgtgtgcatttgtatgtggggttaattttttgtttgttttgagaagacggagtttcgctctgtcgcccaggctggagtgcagtggcgtgatcttggctcactgaaacctccgcctcccgggttgcaagcaattctcctgcctcagcctccctagtagctgggattacagtcatgtgccaccatgcccggctaatcttgtatttttagtacagatgggattttactgtgttggtcagctggtctcaaactcctgacctcaggtgatcagctcacctcggcttcccaaagtgctgggattacatgcatgagccactgcgcccagccagtggggttaatttttgtgatcattgtctggctgttgattattacttgattctcctgctgtgtgtcttctctctttctgagagccacaaaacaccacgtccccttgcctgagtctctagctagctctgtggcccctaggccacacctctgctgcctggtaactttccttgctgcgttgtgacagagcccctgtggccaggcaagtgttgccttggcgctggtcctttctgtgaatatggtggaaagttgatctcagtccttccagggaactagtcttacagtatatgctggaggctactttgtgctgatggttgtaatagccacaatttagtggacagccactgttgccaagtatcttatgtacattggtgacctcttataataatttacaaaatccatgctgtcattgccattgtaaggattaaagtggcaaatagtgaatccaggtttggtgtccaggggtgcctgatcttagagcctgtgtgtggggattgaactggcaggaggtgcagatctctcaagcaggtggggtgtctgtgggacaggggacagctgtgcagtcagcatcagactccagttaatacagaatgcttgacagctcacgctccccacatcacaaaatccaggacctggaagggagcagtgagcacccacattgaggttatttcatgactgtattcacctgacccccactgatgacctcccatgtgaggtgcacacatttgtctacatgtgaatcctcagctctggactgttgggaattttggaagtagtggctgggcagccgaggaaagaagtgaagctgggtgggcagaaatcgaggccccaggcccatcagcctgagtggttgggaggagagcttggagctggggttgtacgagaattgggctgggcaaaggcagtgtccaccttgttgggtgatgaggatgggattcaacaactacctgtcctctggagattgaaaggttaaaataaggcttgttggagcctttgccatctgaagcttctgtatggttttggggtcaaagtaggtttggggaggcaaaaatgagcccccagacactaagaagagaaggcacaggacaggccaccatccatcccctgctgtcccaaaactgacaagtctcgtacctctgacagtaaaactccccgtaggactacaagacgtgggtcttggagctgcagttggcctcaaatgcaggttcacgaactgaccagagccagctgctgcagaggctgagctcattcgcagtcttggtgtatctgaactcatgattgaaagattttgatgtacagtcgacttgccatatgcctaatgtgatatcccgttagactgtgcttccgctttagataggtagtagttacaagggctttcacgggagcccttgtgccttagtccctgtgtccgtttcccattgcagctgtacaaggttaccccagatgcagtggcttcaaacaacacacatttattctgttatagttctggaggtcagatcctaatatcaaggtgttggcagggccgcgttccttctgcaggctctagggaagaatttgtttccttgctttttccagcttctagaggctgcccacactccttggctcatggccccttcctctgtcttcaaaaccagctgtgtagcatcttccgatctcttcttccattccactccatcctgacgtccccttctccggctcctctgctttcttttttcatttgataaggacccttgtgattacgttggacccatctggataatcttgaatgatttccctgtcttaaaatccttgacttaatcacagcgacagtgcctctttatcatgtaaagtcacagttgcaggttctggggattaggacttgggcatctttggggagggtggtgtctgcccacctcagtgtccttcctctgtgtttctcctgagggctgactcttccctcactgtgggagaccctgcacacctgctgtcattggggctgagccagtcaacaccggttgagggtagggggacactggccaacccaaaggctcttggcggtctccacagacttccacttcagtttagaaagtacagtgagaaaaccagtagctgaataaagatttagggtatttggcacagatctgctaatgcacgtgtccgcaaatctagactcagcacaaggagtcttagtttgggatcacaactgattctcctggtccagtgatacctctgggctcttgttcattggctggagctctcctttttgctgggaggcagtgcttcatcttgcagttcatgagatgactggcacttttgcagccggcctcacactgctggttatgtgcatggaagaggtctcatctcactccttcctatggcttttctagctgggcagactctggttcctgtattctccccctcaactgtagtgttgaatgttcactgcccatcctttctgccctgctctgtggctgcctgtcctcatctctgcatcggtcttctcttttcatgtcctgtagctcatgagtgacccgctcccatgtcacctgccattttggccttgaaatttggtaatgattcatacatgtgtcctcgcttgtgccatatccagtgggacaagggaattgggacacctttggttctctggtagctttgcctttttttttttttttttgagacagagtcttgctgtggcacccaggctggagtgcagtggcgcgatctcggctcaatgcaacctccgcctcccgggttcaagcaattctcccgtctcagcctcccagagtagctgggattacaggtgcctgccaccacgcccagctaatttttttgtatttttagtagagacgggggtttcactgtgttggtcaggctggtctcgaactcctgaccttcgttgatccatgtgccttggcctcccaaaatgctgggattacagacgtgaacccctgcacccggcctagctttgcttttaaattgcaagctgggactccagccctgtgaagtggctgtccgcattagatcggacacctggcagacacttgtttaagttttagaattttaaaaaggaaaatacaggagaaaaagtagagttgatcacaaaaagtagattttgcaggaaatagtttaacttttaaaaaagttatcaatgtgttatatgcaaatatggaaaactataaagaagaagaaaacagttgcctataattcttctagctggaggtacctgctgttactcttggggatgctttttgtttttctacctttgtagctttttagtttttttctaagacaaagtctctctcttgcccaggctgcagtgcaacggtgtgatctcagctcactgcaacctctgcctgcccagctcaagtgatcctctcacctccacctcccaaatacctgggactgcaggcccacgccatcacacctagctaatttttgtatttttgtagagatggggtttcacccagaatggtgtcagacttgggtttaagcgatcctcctgcctcgggctcccagaatgctaggattacaggtgtgagccactgcacctgccctacctttgtgttttacgagggttgtatatgtatcacatatgcagtggtttgtccagcttttctcctacagtgacatttttctttgtcctcgccttttcataaactgtctttttaaatgtttgcttgatatttaatcatggatgtattgagatggactcatctcaaactatattaaaaacactctggatgctttaaataaaaaatggcaaaagttaatgttgtaagagaagtgaaaagaaaaccaagagctcctacctgcctcagcttaccctttgtttggtgcgtgggtgcagtgggcagtgagccgtgccattccctcctggcagccggtgcatggctggccatggtccttagcagtgactgtgaacagccgtgggctactttgttacccacccagtgctgcttttgtatgttggcaaatggggctttcgctttccttggtttgattctgtcattgatgcttcagactagtcatgcttttgtttgaagggaaaaaaaaatcaatcaatcaatatcagtaacttgctatagatttttataaaggaaaaaaccccaccacatgtatggtggggagtgagttgatgtggaatcagtcatgaccgcgttgagttaggagcatcgcggatgtggagttacagctctgctgtggatgtttttgttttaagaaaacatcttttaaaaatctaataatggttcattaaaaaccagaaatggtcaagctcactagaaaccgtcatcagccacattctgatgaaagaggttttgactttcttttttaaaaaattaatgaagatacatccaaatatttgtggcaggcaggaaatcaagcggattttaatgggaaattatgtaagaaagcttaatgactaatttttctggatcagacaagtggagaacggtcttagggaaatgtgtacatccattactcattagtttgctgtattataattactgttgtataggaagaagcatgtcagataattaggaactgggtggcattttatgctaaggatcaaaacaaagattttgcttggaatgttgagcaaaattatactctggctgagattaaacacatggcaagcatcctactccagtatttaaaatcatcaggcaggctttattctatttttttgggtctttgttctttcatgttttcctctaatgaaaaggaatgcttagaaaatagcactgggaggccagcaagaaatcagtgttgggattttctcatgtgtgaggagctgttactgctcctgtcgcctggtttcacccctcggttctgctcccaggagctggacccctccccgctggcccctctgtgctgcaagcatccattttgggcttggggataatggtcaagagagttggttggtttgggctgtgggctggacaagcgcttgctgcttaaaccatgttgattgtggcttaactgctgaaccaaaccaatacttcatccaaagaacttctccagggagggagtgggcttcaggggagccacatgggaagccccctaaccaacatttctgtagcacttgattggagcctccaaacaccgtcgctgtcgatgctacagcagtcctgtgggccgcagaaggagtactcactgtgtgttctccatgcccttctgtctctgagaagcagcgtggcgtgttcggattgtgccctcctgccgaccccggtggctcaggcaaagggcttgccagatggtcggtgttctttgccaaatgggaccgatagcgtgcgcatggtggggatgaggggaggactagggaagtaaatacagtgcctgctgccacgtcaccttcacacagtccatgtttaataagaggtcgctgctgtgatgatagggggtcggccagacatgtccactgtttaaaaagcagcatccatctgaggactcattggattaaatgtacacctaaaaaaaatacagtggcacctgcatgcagtgcccgaggatgggtgtgctgttttactagatctggtgttttttggaggtgcacatttggtagttcattgttgggttggtatttgtctccataacctgtttcagcctcaaggtcatttacctttgatcagtgcttcaagcttagcggtttgtttatatacatgttcatgtataaattatattactcagtctgatcataatatatgcccagtgcaaatcatttcattaaagcctcagggatacacggtgccaccgtttcctcattcagggacacggggatagtggtagtgtgtcttcagcacgacatggggaaattcaaaggcagccatccgtggaagagccaacggcagcccgtgcaggcgtcagcgcctggggaatagtagcagtctacatctttagctgtcagggtatctcgttgtagcctcatcctgccctctttaggggtccttggatgagttatcagttgtagtattgacattttctgtaaatagtgtcactcaagcgagtgacagtgggaagcagacaccagcccttagggagcagcccaggatgcttttttcctccaaatgcctctcacctattcccagatactcgctggagttggagcacacatgtctgcagatgtaaaacgacctgctcccccaggtgaatggattctcgccagggccaatacttatccgcaggggtgtgtgccaggcagcccaggtcagcctccctccaccgggccacccgcaccaggttgcctcccatcgtttgcaggagcggaagacccgatggagcaggtttcacagtgccctcgctgctgcctcccgtttcatctgcacgtctctttcaatgcgggcgtgcgaacttccaggtagagccgagttcaagaaaatgaagtactgcatgcgacgagcaagtttattgaagagggtgtgaggtcgcggcgcctgaccctcattatgtcagttactactaaatgaaattagaacttcactgccctttttctttttcccatcgaggtgcaggaggaattgatcttagggtagtattttggatttaaaaaaaaaaaaaacatgaaatgaaatccgtgtcctctttatcctcccctctctctgttctgcgcggcaggtagcaaggaacggtggcggggccaaaggtttcctcaaagaccctgggggccgggcggggctgtgccaggcacccgcgtcgcgctccagctccagccctttaatgctctttgccattcaagccactcactttcattttctatagaaaagcctttctgccgcctttcacaaaacttgtattttcatgcctaataagtgagcgtgtgacatgcagtgggctcagtctctgcatagcccggcaggcagcggctctgctttccagaaccttctgggagtggcagacacacattaggagtccacgcgcaggtagcctggcctttgaagctctccaggctctggccacagtggctttcctgccctccttggctggtggacgtaaggcccctcgccccatctgcttcctgctctcccagagccggcctcaccttcgagactcatgctactaagttgtctttcagttcccctggtggtgcctcctctagacccctgaggagatggagggggctgccttctttgcggctttctcacgatttcctcacagtacacacagcaggaccccggggtttgtgtgtggcatcctacacacacacacacacacacacacacacacacacacagcaggaccccggggtttgtgtgtggcatcctacacacacacacagcaggaccctggggtttgtgtgtggcatcctacacacacacacacacacacacagcaggaccccggggtttgtgtgtggcatcctacacacacacacagcaggaccctggggtttgtgtgtggcatcctacacacacacacacacacacacagcaggaccccggggtttgtgtgtggcatcctacacacacacacacacacacacacacacacagcaggaccctggggtttgtttgtggcatcctacacacacacacacacacacacacacagagcaggactctggggtttgtgtgtggcatcctacacacatacacatacagcaggacccccgggtttgtgtgtggcatcctgcacacacacacatacacagcaggacccctgggtttgtgtgtcgcatccttcacacacacacacacacacacacacacacacacacacacacacacacacaccccttgcttatgtcctccacccgtccctgaaaacatgaggtctgcgaagacgtctttgagtctgtttggcatccccaagtgcagcggtgaaccagagagagagggagcattcacttgattcttcacgcgtcagtgtttttaatctctgtggctggaggacagtgtgtgtcaccttttcttagtttccagggactgcggcttccttccacctctcccttccctctgtagttggacaggccatggctccccagttctctgctgtgggcaggtgcaggagcctgaccaactcctccgtgagtccatctatctgtgcgtgcatttattcattcctccctagtgaggcaggtccctgatgagcagctcctctgcgcctgcccaggtccagcgttgggcatgcagtggtgaacaaaacagactcaaacgcatcttcacagagctcatgttttggtggacaagtggaggatataaacaataagcacaatttagtaaaacatacggtaccacagctagcaaaggtggcaaggaaaacaatgagagcgggggtggtgtgaatgtgtgtgggtgcaggggcacctcgggagcctggccgggaaggtggcatccgctgcaggcccaggtggggagatggtgggtgctgcttccaggcccaaggaagagaaaggcagaggccctgaggaagcacagagcttgagggagagggctggcgtcagctcagggaagcagggaggccaggcggggaggccaggtggtgtggggcctcatggaggctggggagtcatgaggatgtgggaggatgggggagctctggttgctcaggcagtggggagaggacagcaccatggtaacatgcacttgtgttcatgtcttggctgccccattgctgggcacgtgtaaaataggagaaatcttaaagcttgcagctctccatgtgaaaatgatctgtttgtttcttcttattactatcaatattaatattgatcctgtagtgctttcacacttaaattgttgagttcccagtcttgtctaataattatctcagcaattgcgataccattggctgaggttcatggaggttttcaggctaatgtcactgaatgatcggaaggactcactgctggcagtcacttgtgtgttttgtgtttttttttcctctgtctctcgccctccatttttctgcacggcattaagtcagccacattttagattgtgtgcttctgtcatcagaatatctggcatgctttcccctgaatagcaggcttgacatctttttctgatattttgtaccaaccgtactaagaggcttcttgttagctgttaattcatattttctgaggctgctaatatgcgtggtagagccattactgttgcatgttcaagataaaagccaaatctcagcttataccctgttctcccaggataaattcagagaaccactatgaagtctaatccatactgtgatgttgctgaaaagaaaatagggttataggcttatttggagcctttcactgtttatggttgtacaagttgggtgttactgacttataatgtaaaatctgaatttccagggcagggacaagattcgtttttggctaaggcatattgtgtctgtggggctgctgaaggaaaaagagcatcttatttttatgtgattagcattattcaatcacaaaatgcattggattctactcagactgtcggagaatatgcttgctcctctcctaggctctggaggaagaacctcagccactatgtgtgtgtgtgtgtgtgtgtgtgtgtgtgtgtgcatgcttgtacgcctgtgcacagagggtgggaagagggcttgcacctaagtcctagggtcctgttctctgcacagttctctgcataggtttccgcacgccttgctgtctcctccttgttgcaggcatggagcaaattatcacctggtggtaactccagtctccgccacggagactgcttaccctcttcctctttggttcaggctgaaccatcctcactcatcttgtagagcctcccgttcccatctccgcatcagagtttcctactttccttgaactttcctttttgaggagatttgagaagtgtgttgtccaagataggatttagtatcctggagccaggcttggaattctagtgtgggaaagcttacttactattactttattatggcattttaaaagtttttaaaagtaagtggaaaaaggatttttgaacctgttattactttcttatagcattttaaagccatttttttttcctagtgggaggcagaaggaaaaactcggtcatgtttcactcactcctttcttaaagggagagttttatattgtaccttcttgttcacagccaggtggcagctacattgctaattgcaagctttcagggtgagaaagagaacccgtgcctacctgccttttcctgatttgaaatggtgatctgcgttggtctcaagaccttgtgcagcctcgcagagattgctctgcacacatgtgattgcatctaatcaggactttttctgaaactgctgccaggaaaatgtgtgctaggaaggttaccttctgcagctggacttttatgatgcactggattatcatggccttagatataccatcagggcatggagtggcaacagtgctttgctgtcttgacgcatctcaggtagaggatctcttagggagctttctgattgaatcccacgcccattttgagggaagggaatgggccatgggtctcatccctgcctagcgctgccttgtgaggggtgctggcctgtcacctccagttcttgctcctttttaggaagccatgctgcctccttccttgttgtgcgattattttttgggttgtgtctattttggtatttttttctctttcacctcctctcccatatttcccctctagggtgggaggaaggagacccaggtgtgaggtggtgcaggtggctgcagtgtcctcagagatactgagctgtggggtagaggtagctggaatctagatcaactcacctctcttttatcagccatttgttctgagaagagaggcttcgaggagagacgcttcggtaaggggttgctgtgggtcctggggtcacgggtgttagttctgggtgccactgggggacacgagagacagaaaggataggaatgaaaatgaagagcaactaagggatgtgaagatttctcttgcacttgttttcgggataggaaaacaagcccttttagtctggggcaaggaagtgtctagtgcctccacctggtcatccaccgcggtcctcctggtctccgttcaggcccacaggactctggaccgccccatccctcccagggaactgtcccatgtcctgctcaggaaggtggtggggaaggggtaggcaggatggacagatggacagtggcaggtggggacacctccatctcattttgttcctctcaatccgtttgtttttttctctccctccctctctcctcttttttttttttttttttttgagacagagtcttactctgttgcccaggctggagtgcagtggtgcagtctcagctcactgcaacctctgcctcctgagttcaggcaattctcgtgcctcagcttcccaagtagctgggattacaggcacacgccaccaacgcctggctaatttttgtatttttagtcaagacggggttttgccattgttgaccaggctggtctcaaactcctgatctcaggtgatccaactgcctcggcctcccaaaatgttgggattacaggcgtgagccatcgtacccaacctcaatccatttctttatcctaattgagagaatttgaaaagaaattaatagaatcaaaaaagagaaaagggcctggttatcagagatgcaaaataaatgatgattttaaagatgctagaaagctgtgctccctccctgggtgctttctctttggaggggaatgctggagaaaatctctacaaaatcttccccttgcagtgctgggagagagtaatggtgagcaaatccttgtagaattaaaatgggatgaagagacccttatgaagggagaaagcaggtgaagatggtggggataggggcgggacgtgcacccccttcactttccatgccgggcagtataaaaagtgagaagaaacacttcagggctggtgtgtaaacttcatgttggataaatacgtgacttctggtattttgggggcatggaatcaaaaagttgcagatttggagggatgtttgcagccactttttacccaacatggctctctatgtggtcattcagttgcttaaacaaagtctgggtagacttacaatttttttttaatacaagtaatatttgcttatagttttaaaaaagggagtataaccatcaaaagtaactctagcgaatgattttggaatattccagaaattttctatccttatataagctctaaaacagttaaacgcagtagctctatttaataatcaccattgggcacgtggactttcatcagtacacatagatttgcctcacacaaacaagaatgaacttgaatgtacagattaagggataataaaaatgccagcctggctgccatctggctgaggagacgttttacaagaacctttgaagcatcttgtgggcctcttctccatttactttgcttccactcccaacccccttcctaaatcttctgtccattatttcctttttccattcttattctttttttttttttttttttttttttttttgagacgaagtctcactctctcgcccaggctggagtgcagtggcgcgatctcggctcactgcaagctccacctcccgggttcacaccattctcctgcctcagcctcctgagtagctgggactacaggcgcccgccaccgtgcccggctaattttttgtattattttagtagagacagggtttcactgtgttagccaggatggtctcgatctcctgacctcgtgatctgcccgcctccgcctcccaaagtgctgagattacaggcgtgagccaccgtgcccggcctccattcttaattttatcacttaacatatttgtatctatatctgaatctctatctcattatgtatataatgtccctaaagtatatattgctcaattttacctgtttctataaactttatatagatgtaatttacctgtatgtggttctgtgacttgctttgttggctaaacatgatttctggtaatgagtcatgataatgcacgtcgctatagttcatccattttcactgctgtataatattctacttaatgaattgcatggtatgacctccattggttcttctaacggctgcattatttatttttttctgcccacactggatattatcttgacatattaaatgggtaaggacctaagttgtgaatgatcaggttgttccaggatggaagttgttatcctttgtgcaaacagggttattgctctcaaggctagaactgtttgtgtgctttgtattttcactttcattttttgcagctggacttcagagcaagacctaggaagcaaagtgcagttcagacagtgggtcccgggggggggccagttgtcagagagcccggagttaggtgtttgaagcctagtgagcagagacccatcctgagcataagggccagggccagggacttggccttggccttcagggagcccgcccttgtgtggataagcgggattgaatcctcagatgaaaaggaagcaatcaatggagctgtttgctcctgcagcttcagacagcgccatctctaccggatcaaaagagctcatcaactcccagcctccatcaccgaaaaagaaagtctcatctctgtctgataatacctattcattgttaaaaaggaaaaatcccaaatccgtacatcctcctgacccatgtgatactgatacatacctttgatgtgtccattcagattaaaaattcttaacaaaatgatacatattttacatgtacaatcatttcaaaatatagactgttctgagaattgtttgcaaatatgatcataaaaagttgattttcttggagactttaaaaaactagtttgttgtatttgctttgtcaatctctatgtaagtaatatatgtgtatttttgtgccaagccatttgagatgccctgcaggccccatggtgcttcagcctccagcactgctccctgtgtttctcagaccgaggcccctcctgtaaaaggctctgaatctcgctttcacctgtgtgaattgcaccacccaaggggaggggtccagttgcattgggcttttgtccttcgttttcctgacctggggacggtctcctggaagcctgacttcctgtttgctgagggtggacttttctttgggacctgtttgtcgagttgagccgggagccacagtcattccctccctgggtattgtgcgaccctgctcccgcctcctccccctcccccccccccgccccctgcccctcgttgggtgttgggtgttgggtgttgggtgttgggtgttgagtagcccagggcttctctttcctggctgggatgcaggcagtagtcatatcatcacagtcatcaacagccaaagtgactcagtgtcgcccacaggttctgagtgggggcttgactgagccaggcagcatcagtgagaaatgcctagtcggaaggtacccgttgttcaggatgaagttagtggcttccctgccattcggtttccactccaggagagagttgaatcagagcctggaattctggctgatgggctgtgtccccgtgtacggggagaactgctggtttcagtcttaaccaggggacgaaggacatggcagagcatccagagaagaagctggggctcggcctggtctacctggctgggaagaaccgtgctggattgagctctgcagcaagggctgtggctggccgggggtgtttccccggcctctccccagcctggagctgtggcgcaggtgcctgattacagtgcttgggagagcagtgagggcaggtggggggttgacctcactctccaaggatctgtgtttcctggagcccttcttccctgcaggcctaggaggctgggctgaaaccacctcgggcctgtgcatctgtaggaacagcacgagagctccttggagtggtagtgtcagggcggtagccatctgagctcacactggccctaggggctgtactttggggtatccaggggcaacacgtgccctctaaaagcatagacctgtcagggaatcacgggatggttccagggtaatatctggtcaagggcttgcggcagataggaagagttctctctctgccgcctgtgcccaggccactgctgtggcctagatcgggttggctctggccgtgccccattcctcatgtgctggctattgagtcaccccctgcccccactttaaacaagcatgtttgaatgcagagcgattcgtggtgacagtttcataaggctaacgttgaatatgctcaaatgcttaaaaggcatttcatttgtgaatggcagcatgtctttatgaggggtgacagattgctcagatatgactttccctggttttcaggaggggtctcttcctgtccagtggtccagggctggtcaggcggtgtggcaggaacggagccagcagactccctcttggtaaaattgtgcaagaaacgcaccacctaggtttgtgcctcctgccgttgcttacgaggttctgagtcccgcagggactggctttcttcctctgtaggagtttcctaccatgtaagttttagaaggaaaggatactctttggggcctcagcggtccccttaggctgagcatctgaaccttcccgtggtccgtgtggctggaaggaggcttccatcgctggaaatccatttctcaaggcgaggagccagccgggccgaccacggagccccttcctctattatgcacgaagtcatccaggtgtcatcccatcagtggtccaccaaggtgggacagtgcagcttgggccgggcagaggtggggaggcctgctgggtacccctgctggattgtagatggcccccaaaaccaatgctgcctctcacaggaagcccttcgcctgaggctctcccacactgcaactgtcaaactcgaatttccagttgatgtaaaatctgtcttcctactggaatgttgacttgaggggacctttcatctcagatttcagacttgctttgtttctgttgggtcacgttgctgtcttctcaatactcgagtattcttggtgtggtggggaagtttttgagttaaatttgaatagttttaaaatttaggtttgagtttagcagtattctaacggggtaaggcgtcacttgacatactgataaatcttttacattctatatagtggaattagacaattttctgaaccttccgtcccaaccttccatcccttaccctggttcttgctactttgttgtttagatcatggtctgttagcggaaatatgactccatgtggtccatgatatgggcaccttacaagttattctaaataatggcacttaggttcaaagggcttgttaataatagtgccattgaggaaaatcatttgggccatcacccccttctcatgttgaaaatagcgttaagtgttcaagagtgtgatcggtgaaacacagcttaattcagctctacaggtgtgagtatttagccctggaaaggaaggaatgattattgcagggttagaaggttcaggagaacagtgcctccctcctagtcacagttctgcagggctggcgtgtgagcccttacttagaggtttacttataggaagtttgagactgagccagaacctttctgggtctcttgcacctgcgggggaagtagtagcagctggggttttctgctttagcacattgttagttttactccgactccgttgctgtttcccagagtcatttgctctttctgaagacactggcccgtgggcgtcactgcccttagtggagttccttcctggaggctctccctgcagattctgcctctggaaatcaacacgtattgcccctgtgctcccccggattacttggctggagtcctctttccctcctgtcacctgcagtggcattcttcttccagcctgtgggatgttgctttatgctggacagagctggattctgtcttggctctgctggtgctgaaagttccccaggcccaggaccaccatccacacacctccgatatctggtgaagcaccaggcatcgtaggcattgctgagtatttgggtgactgacttctgagcatgaaggcagggagggtcccctctgtctggatggtaccccacccttcgcccctaggcaccttggccagaccctcctcattcttcaagattcagcagcccttgccttctgtgaggagtgagttaggtttcatctgtgcccagctgtgctgtgtgctttgcaaatgaactggaacagtctgtctgtgaaggggatgtcagaaattcaaggatgggggacagctgtcatcaaagcaggccacaccaatctgggctgttctgctagaattcagttgatttcttattttgtgtgactgttgttcatccgagcccaaggtagagctgcaggaaccccatgtctgagtgtccagcaggcccgcaggccctcgggtgccacctgatggggccatcctgccttttcaggtccttgattatatcccacaaagagaaatagatggcttaaaagtctttttcagaggcagaagggacaagaaaagtggaagtgtagtctggaagtagccaggttttaagttaaccaggttacactcttggtggttcctggcgtcctatcaagagaaggaattatggccccagagctgtgcctgggacccgcatgtctgtcacagatctctgctgggaagccaggctgtggcccttccaaggtgaatggtggtttccatccagggttcaggtttcttagcagctagtggtgacggtcagggtgtgagtgtggggacgtggctggcgtggtgacgggtgtgtgggggcatcattgggagtgatggcgatggcttgtcttctcaccggccggtttggagtccagaaccacatgaatgacctcagggtgggtcagaacaaggagctgtcagtctgagacctctcagtgtgctctttcttggctagcaagttactttaccttggtagtcattagtttcttctttgactaaatgaaaaggtttttatctagatgctgctgtgcatcttgaagcatgttaaaagaaggttaaggaaaaccagtttgtggaagctgactgagcaggcggctcactggccgtattcagctctccacccgtagggacctgctgtggcagccataaaactgtgcagaggtgaaccacttcagcagaaagatgcttccccacagagatctgggagcctttgactgttgaacagggaaaaattccccatgcttttaggatcgtggtgtaagaccccactgtggagagatgctttctatgctgcaacacagaccagggaggtgacgggcagtggctttgggacaccatcaactccaaggagatggcctagctgcttgaggcccacgtccagagttacacactttattcttctgattcttgaaggctttaagaaatctctttagcaagtctctacttctttttaaattttactctttcctcctatcacctgaataaaactccaggcagtaatatgctgcttacattgacttttttttttttttttttctgagatggagtctcgctctgtcacccagactggagtgcagtggtgcgatctcggctcactgcaacctctgcctcccgggttcaagcgattctcctgccttagcctccagagtagctgggattacagacatgcaccaccacgcctggctaatttttgtatttttagtaaagatggggtttcaccatattggccagattggtctcaaactcctgacctctggtgatctgcctgcctcggcctcccaaaatactgggattacaggcacataccaccacgctcaactaatttttgtattttagtagagacggggttttgccatgttggccaggctggtctcgaactcctgacctcaaatggtctgccctcctcagcctcccacagtgctgggattacaggcgtgagccaccatgcccggccatgagtcctttctactgtggggttggtcttatttccccttgctcccgtgagaagctgaatttgcaaatgccagggtgaacttggtaatggaggcaacaggcagatgcttggtgtctgtgcgttgaacagaaaagagcccggtgaaattccacgcctgtttgtgtttagcacacggttcctgaattatttcatgagaatgcaggtatagcggtgacagctacaatatttgttagccaagctgcggacagagggttggcctcaggctgctgtttctgccccagggtcgtgagaaatagctgtgtccattttaaagcaagaaaacaaatggcacgattgctctgctgttcctgtcctagggcagagagctaagtcaagcactcagtggactgcgtctcgtctcccttggactggtagtgacagggctgccctgcacgccacactgctctcctgttcctgtagtgtcgctcatgtaaaatgcactgcaggctggtgctgctgaatcggctcactttctcccatttccttctcctccactttcagatttctttcagcactctccaacttaccttcagaaatgcaacaatgggccaggcgcagtggctcacacctgtaatcccagcactctgggaggtgggtggatcacctgaggtcaggagttcgaggccagcctggccaacatggtgaaaccccgtctctactaaaaatacagaattagccaggcgtggtggcatgcacctgtaatcctagctcctcgggaggctgaggcaggagaatcacttgaacccaggaggtggaggttgcagtgagccaagattgcgccattgcactccagcctgggcaaaaagtgcgaaactccgtcttcaaaaaaaaaaaaaaaatgccacgatgtatgaagacctgcagccccttatctggaattcaaaaaccccaaagcactgatttttgcagcccactcatttggcagcagaacctgagttatctgctcatgtgagagtgcacctttcattacaaaagtacccatgcgtttgactaggggtgctctgggacgtgggttagccaactcaggccactgccccgtttttgaacataaagggttattggaacacagccatagcctttcgcttatattgcctttggctgtgtttgtacctggtccttacagaaaaagcatctgtacccctgctctggagcggacctgccctgctttgcttgcaaggtggtccgagcctgggtggaaagcactgcagggcagcttgtgcagaaactgggacctgctctccttgtagagacacaaccccagggtacttggagctcatgctaatgactaaatcattcaagccttcttcttcctggattttatacctcctagttctttgaggacagtttgccacgttcagcaggattttccagaccttttatttctaaggaatacaaactagaagggcctggtttctgtaggtgacaaagctggggggaacgtggaggacagggatgactggagagagctggcgagtgcagcctgctgggatgccagctctcacctgggaaggtcagcgtgcagggttgcagactgcttaagcctcctcctgtcagaggaccccagagagctcccccagctacttggagagatgctgttgaggttgggaggcaatgcagggtgttcatcagccagcatgagaccctcgcttccagcctgtgcctttagcccagccttgctgttctagatggtgttggcagcctttttcacgtacagagttgcattgctcctccgtcttccgcgtgcctgtgggcagcttttgttcctttggattacttttgtttctttaaaactccttggcaccatctaattttttaaaaatgagcctaatactgttcacgttttagcacctggcaaatgtattgatactttacgagcattcacatgcatttaagagtgctcttagcagttcgcgttctatatagaactgtttacacctctcaggattcttactctaacaaacaggtatagacaacatcctagttgcatctcaccgcggcctaacatccccgggagcatggggattagtggagtgagtgggaggactcgccctgcgcaggtggagggtgatgagaggctggggacgttttcggatgaccacaggtgtgaagctgtcttcagtggtgggggaaccacctgggccttgggccttggctctggtagtctcacataactctttggtgtctgcagctgtataatatgatggatgtccttgtattgtacatttttaggaaggacgggtagggttgctgcttcagagatcaagtggcatgtccacatctggagtagaccctgagtggggcagaaccatcatcctgcgtgcagcctgcacactcccagcacccgtggcagtcttagcaggtggattatcaccgagcacacaggcagcccgaggcacctcctcgtcacagtgttctccgcagccctgactggcgaggagggcacgtccccacgttcatgccctgtactagggtcccctctggcactctttctctggggctctgtgttccctttgccttttgagctcttcataaaatcactgccagtgacttctcatagctgttcgtcattgggagtcactgagcatgcacacgggctgtcaggtcctggtcccagctctgccttcctctcctcaaatgccattcacagcagtgtcagtgcctgcccagagtgtgctagaatgccagttcttgggccccaccccacacctgcgactccagactcagagttgatgagggtctgcaggcgtcggtctgggagccacagacaggtgtgtttgccgcagaggtgccgagggcccagcaggactgtagcacaggatcagcaccatccacacctgaggcgtggggatctccgggcatgatgcggaatgtagtgacgatcgcaaatccttcctgtggccaaagagtgagctctttgatgctgatgagatagtgtttatttatttttatcttattttttttgagatagagtctcactctgttgcccaggctggagtgcagtggcactgtctcggctcactacaacctccacctcctgggtccaagcaattctcctgcctcagcctcctgagtagctgggactacaggcgtgcaccaccacacccagctaatttttgtattttagtagaaatggggtttcaccatgttgggcaggctggtctcgaactcctggcctcaagtgatccacccacctcggcctctgaaagtgctgggattacaggcgtgagccaccgcgctcggccatagatagtgtttcttaagagtgagtttgcttctgaggaagagaagtggggggtcgggggcatcccacctccctggccacctccagtggtgtgagttggttgcttgatgtcatctgaggtggggccacccgggaaaggtcttcatgtctcacttgtatgccttcttggatcaggatttccaggcctctgcatctcttgagttgattctgaaagggtgaggagagaggggctagacagatttttttttttgagacaaggtctcactctgtcactcaggttggagtgcagtggcttgatcatagctcactgcagcctcaacctccccaggctcaggtcgtcctcccagctcagcctcccaagtagctgggactacaggtgcgcagcaccacacctggctgattttttttgtagagacgggtcgtccagtgatactcagattggtctctaactcctgggctcaagggatacacctacctcagcctcccaaagtgctgggattataggcatcaactaccattgccagcctgagctgcatgcattctaaggacactttgtgagactaattaaaacgtttttctttccaaggcacgtggcaggtgggtgctgtttctttcctgcaggatgtttgctgagcatttgtgagtggagcatctttagggaaagcaggacaaaccctaaaagactttctctgaatgttacctttgctcttcaccttgactggtagatcctgaaggcgtagaaagagggtcctctggagaacacaaactgagcgttgctgggcctcaggagcttctagtgatgctggaggcggccactgctgtctttcagctgtgaggagccaggagggcgatcccagctttctcctggttaattttaccgtcttttaaaaaggaagttcacaagatttcttgaaagaactctagttggagttgtagagctaatgtttttttctctggtccctgccacctgctggaaggagcctgcagggaactgtttgttgtgtgcttggctgttcagtgccccataactggccgcggtactgccacccgctggaaggggcctgcagggaagtgtttgttgtgtgcttggtgttcattgccccgtaactctggccgcggtagtctggacagggcttctgagaaccacctgcagttctgcttattgctggtgttgagaaatacagtttctgcaggaaagagagagacattggtgccaagaaatcctatcggggacatttaataactggaagtagcttaggaagccaggtttggagtgctgccttggtgtcgttataatgcaagtgggatttcattatgtgtttaaggcttggcattgttggaggtcaggaagaccaactaagtcaagtagagccattggctgcttgagtgcagtgcagagcactgggaaatggacttcctgggaagtgtgggattttttctgctactccttcattcacacctggattcagttgccctcatgagctcacccgcaatgtgtgtagggggatgctgctcccattggccaggcactggggatgcggcgtatgggcaggtgcacacacacctggcagaggtttggagctgggttgtgggtgagggatgcagagaggcttaacccagagaatggaggaaaaggagaccaggagagttcagagaggtgaagagtgaggagagagcagtggccaaagtggagagagttgagtttcagaaagccagctgcagaatgcagtgcctgacagagtgtgatgggccccatctctctctgctgagccgggttctgactctgcagagcattggaggccttgttgtgggctcaaggagtgcagagaggcagcgcctgccttggtcgtaacttctcacacacatacatccacacatgtgcatctgattgtgtgtgtgacacagtgaagggtatggggacagccacatctgggtttcagttttcagtcagctccctagctgggtggttcctctgagcctctgctttatttcatctgcaagtagcattaatactataactgaatatacagtcagctactcaccactcgaaagccagacttgagagacaagggttggtgggagaaacagcaggtatatttgaaaaccaagaagatggtgaactaacattctcaagtactgtcttaagtcagtacagattttaggctttttatattaagggctgggggaagaggagggggttgagatcaagagatgaccaacgactggacatctgggaggcagtgggggtcagaggaagttgggtttttttttgtcttggtcaggtcacgatgttcctgtgaatttttaataaaacatagttgtttacatacttctcctttaatcccacagctagttttaaaaactacatgattgtgttgctaggattagttaagaactgatttgaggtcactagcacatggtgagtagttagtaaacaattgcttctgctagaatcatcattgtcaatattaagaaggcgagtccacgcatctctctggcctgttggctcacatttgggggtgtggcatttgtgcgtgaagtggagcctggtccctggtgacccaggtacagtttacgtctggagccagcatttggaaagttgcctccagggccctggatttggagggagccaactgccagagtctcaagcaggtgagggtggggtgcaggagaggagcgttcagggcacctctgagcacatgtgacattcgtaagtggcactcctcatgctgagcaactgacgtcgtatttccacccgacaatggcttgattcacttgataagtgaaaggaacttccacgtaaggatcccgaagcacggttgcctccgcctcccaccccaccccgtggtgcggcgtgtgccaagaccagccctctgaggtcagccctcctggaccccttactgggtggacaaaggttttctgtgtgactcacctctggccagaaatttagggaagcttatttgtaactaataccacccagtcactgcaggagacctgccgaagggctctggggaaagtgatcttcaaaaatagaaaggttgagtgaaggtaggacttttgggagaagcagaaggagcctataagacagcacattaatttggcaggtaattaggaactctgatcttgagcatctcattttaattagcgtggtccagcctgccttacggtgctcacgctgaagcagagagtggcctgcttagctgctccgcaccatttatttgggtttcttatttgggaagtttgcatgtgactgggccaagtgacatttgttttgaggtccctcccagggcccaggggtgagctcttgacaaccccagagtagagatggggcacctgtgcccgggcattgatttcctgggaaggaaagaaaacgccaggccatgctgctgtgttacagccctttaatcagaagcccctgctgcatgtgggcctgctgttcccagtgcctttcaggaaaccaccagaagggctccagctttagggaggatggtccatttacacgcctgtggttggaggttccaagtgccttgaaaaatgccttgatgccacttggagctgtttctttcttctctttcctttcccttttaaaatcacggaaccatttctttctttctttctttttttagacagagtttcgctcttgttgcccaggctggagtgcagtggcgcagtcttggctcactgcctcccaggttcaagcagttctcctgcctcagcctcccgtgtagctgggattacaggcgcctgccaccatgcctgactaatttttgtgtttttagtggagacaaggtttcaccatgttggccaggttggtctcaaactcctgaccttaggtgattcgcctgccttggcctcccaaattgccaggattacaggtgtgagccacggtgcctggccagaattgtttcttgagtttttcaaacaatgctttctctccagccagttcaattgtagagggtcctggagaggaggtggagcagttgccttctcagcatcgtggggtggggctgggatgaggagagcgcggccgccagggtcagcctggatgctcctaggcagaggcacaggggttgctgattcttctttccagatggatgtttctaaagtctttcttaaaggagccagaggcttgcccgccctgcagtgccatccttcttgccgctcccacccacttctgtgatgcacagaacctgccgccctgccctgtctctttgtgttcgttggtctccatttctagtgtctgagtaaaggcagtccccagtccagtctgcaaagcctggccacttgcacaggaagatgctcatagatggctggttcctgccagtgacacacgtggacctcaagcaggtggatgggtggagctcagggaataggcatgtggggcacactctccaggcacatccagggctggactggggccggcatgggggtcactggctgcaagcgaaggcagcttatgtcatgttccctctgccaccgccagctgtcctgcagcaggaagaggtagtcatgtttggaggccgggctgtgcatgagctatgcaggccttggggtcttttcatcagattccttttggcagaatataaggaagttggcccaaaccacatttttgaacttctgctttggccttgtcagtctccttctgtgattcagaccgtagtgaagccctggttggctgaagtgctcaggagaggagactttgggggtcatcactcatttctgagttacagaagttaaatagtgacttggttcggggtcatgccatgtgtgtgaggcctgagtttgcaggtttgtgcagggcattgattggttggttggttgattggctgaggaatatttggggcacctgctctgggccatgtacacaatgaggcaaagcaatacttagacctcaaaaacaaagcgatgtagacctatctgctgtgtccttgtgtttctgcctgtggggcacgtgggacatgtgagggagaaacagcatcctgcaggagagcaatgcctccagcttggcttctggaagcctccagaaggatggacgggggcactgagacctgaagaagggttgtgcatgtgggagggagccagcctggtggaccgtggcctgcacacctgcagcagctcctcagagctgccccctcatgccttggccaatcacagagcaccctttctgtccaggccactgatcagcccccaggtccaggtccaagaacaagcctgtgaccccctgggtcccctttgtccttggcctatacctgccttctgcattctggggctaccctttgctccagtggctacagaagagagaggagggacactgaccccaaggcccaggccagtctcgtccaggctgcccacacctaggtcttcaggatgggacaaggcagtcttgggggactttggggtgacacaaaccagagaagggcttcagcagagggccatgagtgcctaaccgtttacctgttttctgctctgaccaggcaccttgggggagggaaggcatcaggagccttctgctgagttcagtggaaggtggtcttcctttccaatactctggttccctctctcccctatgtgcaagtaaataacatgctactatatgtaaattaacacaaatgaatgtaagatagttatatgtgtctactgccttagaaagtacagtaagatgaatattaaacttttcagactgtaagatcgtgaatctgaaagtcgttgcttattgtatatttgagaagtggcacttatttaccctggagtgaatgtgttactggaagtgtcttggctaaattcctgacctaagcttgtgtggtcttttgctcttcattggcaatgtagaagtcaagtttgaactgagggctgtcttattttaaatccaggtttgatcattttctgaggatatagcgtttagtgcacacctcttttgtgcaactcagggctttctggaggttggggggcggatcccgaaggcagacttggccttcccagctggcgcgggactggggacttaggggactgggtcctggggtgagctctggagcccgtgggtctggttgtcttgctgacctggtctgcctcctgcttgcttccatagcagagcctgtgggacgtgaaccaccattcatgatcctgggaggtgaagccctgggaactgccacttggaatgagaggggaaggctggaactgagctgggctggccatggggatgctcagagcccggctctttcatgggatcacagtttgttcaccttggaagctgttgctcaccgcgtgttgattttatttaagactggaaaggcttgtccatgtatcgccgttgggaagggaaatcactccgaagacggtgatgctgggtacaggctctggagtcatcttgatttggtaaaaggcatgaagtctgagttcattccgaagattctggcttttgagaacttatataaagagaacttataaaaaatggaaaatgagaaacgatgatgtcagtgaacatttattggcctttttttctgtgccaataactctcagtgcttaacctgaagaagcccacttaatccttccagcatcctgtcctagaactttccctgctgtctggataaggaaactgaggcacagagggtcgaggaacttgctgtggtacacccagacagcctgaccccagagtgggcacttcaggtcccgctccatggccgtgtgcaccttcatggtacgtgctggggttgtgccttatgaaaacaacggacttggctacatttcgacaaggggaagttagacactttagattcacagttaactgttgatgcttaaatgacatttgaggaacctattggtgctttcttgagccctgcgccatgtgagtgaggttttgtggtcctggacaggtgagctcccctccagaggctgcctgtttgtaaaataataggtttagatgaacaaagtggtctttagaggcagatacacctggggcagagtccatctgtgagtgggaagagtaccaggcacgggctgtggagaagcgggatggcgagtaggaggctggcggccttccctgtgtggaaggggcctttctgtgtgcctggccccgcagggtatgcagtacacacgcacatttatggggattactcggttccgcatgggctgtgtgtagaggtgggtgggatgctcagtggagatggaccaggctctcctccttgagtactgtcacctcttccttttctattctgtcacctccttctcatcacctctgttgtctgtccctgacaggcttctgtgctttggagacctctgtgtgtctttcttggttttggtttccctgtctcccagcatctctgggagatatgtgtatgattgattccaagaataaagtgtgaccaggaaaaccatgttttgaaatctgacctctcaagcccttgaaaatactcagagcttttccagaatgttctcatgtctccatccacttcctttccctttctgctttaaccccgctaccctccagtcgtagccttcaggagaaataaaaagaccccagagaggccagcctactttcccccacactgagttccaggaagctgagtctggttttcccataggaacaatgttatgggatggggactgcattcctcacaaaggactctgcctcgaaatgtgcgattagaaagatgcacccgctttcagccgcagcaacttacaataatgccgttatgccctcagccataaacacattgtgcaaattgatttcttgaggagccccaaggtactgtgggtagaaggagagcacatacacatgtgagtgctgtgaaatcattaccatagcctcagacatgtctgttcttaataaggaaaaaaaaagttcattacacgtcattgaagatttttttttttagatagggtctcgctgtgtgtcctaggccggagtacggtggtgtgatctctgctcactgcagccttcgcctcccaggctcaagaaattctcccacctcagcctcctaggtagctgagactacaggcatgcgccactacacccgactaatattttgtattcgtgtgtgtgtaggtggggtcttgccatgttgcccaggctggtcttgaactcctgggcttaagtgatcctcgcacctcagcttcccaaagtgctgggattataggcctgagctgccaccacagttggcttgaagattttttagaaacttgccagcttagtctttataaaaatacgatgaaggggtgatttgggtgtcccaagactgtttggaaggttgttctgacaagcaagtgctgatgttttgtacttgatcggcttctctgtggcaagccagaggcgtctgtgatgagcgcctgcagacgctggtgggtgcttgccgtgtgccagtgattgattgacgttagtgtcggtatctctcattgcgaacattcttctctaaggttgaaaatcagtttttcattatgtaaataatgtgtactcagtgtagaaaaaattagcacaggaaatagaaagctaaaggatatccctcatgatccctcatccagatccccagacgtgaccactgttatgtggttatatgttacgttatagcctcccagaaattttctatacccctgaaatttaacattttggtgggtatgatgtggtatctcaactgtggttttgatttgcatttccctggtgactaatggtgttgacctttttttttttaaatatgcttatcttaaagcatatttatatatttgtatatcttaggagaaatacctattcaaatcttttgactgtttttaaattgagtctttttattgttgagtggttggagttatttatggattctggatactagacacttattagatatatgatttgcaaatatattctttttttctgtggtttgtccattaatgttcttgatattctttgaggtactaaagcttttaattttaatgaaatctaatttacctgttttttctttgattatttggactttggtgtcatatttaagaaatcgctgcctaatccaaggtcatgaggatatactccttgtgttttcttctaagagttttctgatggtttcttttacgtttaggtctttgattttgagttactttttgtatatggtgtaagatggggtaattgtcaattttttaaaaggaaaatgaaattctattaatattgttgtacaagttggttttcccctccacggcatgtttggctgtcttcatatcagcatgcttagatcatttgattgattttctcttctttctttctctctttctgcttcctttcccttcccgtctccatccctccctcctcacctccccatgcctccctccatcccttcccctactgtggtagacagaaaaatggccccgagatgcctgtcccctaatccccagaacttgcgatgatgttacctcacatggcaaaagggactttacggatgtgattaagaactttgagatggatgatcttgtgggctcaaggtaattatgagagtacttaaaagtagaagagggaagtgaaagaggagagtcggggactgtggaaggagggcgagagagttgcagcactgttggctttgatgatggagggaggctaccagccaaagaatgtggatggcatctaaaatttcggaaaagatgaggaaacttggagcctcctgaagggcatacagccctgctgacacctaagcctggtgagacccacattggacttgtgaccctcagaactgtcagacagtgaaatcacgtcgttctaaaccagtcagctgagtggtcacggcggcagtagatgagtgcacctcccctttccaaccttctaaacctcaggtgttgccttctccactaggccaagcgatgctccaggaaacctcaggtcacagccagatgctccaccctccatcagtttctcatgtgtccttgaaaagtcataaaaaatgttgaccagaatgtcagcacagacagtagaggtgggagtgtttctttggagtgggtgccgctgcctggttgtttgggccatgcacagaaggcttgtggcaggagcctagggtgtccatttagccttctctgttgtgttggcttccatagggtcactgcctcctcgcctgtgctctctatgtgaacacagagtttctgcttcactgtgggatgaggaggcttcagtgaattgtccacagacctagtcgctgtttccaatgttatttccttagggaagagtatctccaattttaaactgcccacaaacaaatgacgtttaggaaaccttgtaggtcaggagctgctggggtctgcgggtaagaacaggagggcttcctaagctcttccactgatttagggggcgaggttgggaggggtttcctgacatggtagaatttttctttattcctactcgttggttcaggtgtgtaattattaacagttacaccctttatctcctgcttcctctggctgctgacttggagggatgctgggagaaggggagggctgaagagttggggatgggtgtgcctggcttccttctaaggtttagggctgaccctggacagtcccagccccaggcaagtgttcttgaggcttattgctgtctgcctagctggggaggatgttgagaggattacttagctaattcagtatttggaaaaagtatctgtaaacttaaatagaggcccattacataccttttgtggattagaactgtaattgacttagtgtttaaggcagaaactaaggcctttgatttaaaaactgttgacagatcggagcctaagccgcttctgtttgcagaggagagccatgacttccagtcaagttgaaacatagctttctttatacccttcccagttggacttctgtcatattttacaaaattcaaggcttttcatttaacttagatttatggcttttccatggactatcttgaggtttttctccaaagcaaaccagctcataccttgacattgtcaaaatagcaaaaacacacatcttaacaaatgatggcaaaatatttgagctgagagattggggtatgtgtagtgttacacctttgcatgtaaaagattatgtcaagcaatcttctaaaggaaatcagtttttagttaacttttaaggctattcaccatgatttaaagtgattccttgattcctctgttacattaagtgtgattgaaactgtacctttattttctcatgccttgataagcagtgtagtcaaatcataacatattatgactgcaatcaagtgattatagcacgtgattatactttttgtctctgtggcgtgaggagtggaaaggtgtctttttttgcaccacttggcactaacggtggggagagatggttccccgaagccccctccctcttgtgtgttttggggcagagcgccctgttcctgaatagcacggattgcacgtgtttctgagcatggtgtgtgagactgctttcccttcctgcagtcaactcgccaaggtgcctccccagccccagcagtccggcttctctcctttccgctgccccatgctttctggtggcctggcagactcaggactatctctgagtccttcacaaaaccctcctccacatgccttcttttgtgaaaaccctcagtcctctttaagagcagggcccctggagccagacagctctggttcagtcctggctccggtcctctgcagctgggtgaccctgggcaagtcaccatggctctgtgtttttcatctttaaaatggggatgctggctggtgtcgcggctcatgcctgtaatctcagaattttgggagactgaggtgggaggattgattgagcccaggaggttaagaccagcctggacaacatggggagatccccatctcttttaaaaaatacaaaaaaattagcccggccggtggtgtgcgcctgtagtcccagctactccggaggctgaggcaggagaatcctttgagcccaggaagtcaaggttgcagtgagccgctgcacaccagcctggggcaacagaacaagaccctatctcaaaaaataattaaaataaaataaaataagtacagtcgctttgccctggggctgctgtggggagtctgcaaacaggacctgccttgtgctgaatgcagcatctctgttgtacttgggaggtgtgcagccccagcatctcatgcctcgcaccctccgagctgcctggccttggctgtgcccccctgccctggcccactcggcgtccccagcacttcatttctttccgtcctgcccccctttgctgtgtctggtccttttatcactgctcttgtgtctgcctctgtgccctcctgtcctggccacggcttgagatcacactgccgtgcctcttgcccaggtgaccccctgagaagctacctgagctctgctaatcagccccactttcctctgcccaggcagaaactaagatgcctcggctccttctgtggaggaaagtaatgtgttaattggatccagggtcctcagcacacactgggctatttttacagtcagacaggaagttgtcgttttataactttatcctgtgtaaattatagcccgggcggggggtggggggacttggattgttaagaaagtgatcatcctgttcttggatagggtgattttggctgtctgggtaagttctaggaatttgctgtattctcttgattctaatgaactttgctatggcttgggaaggggcctctgcatggagagagagaaggaagctagcgtttcttgagggtctggtatatgctaggcactgtgctggctgctgaattggactgtttgatttaatccttgtcacaacccctttgaagtggtcttgttaccctcttttacaaatggggacattgtggctccagcaggttaagaagcttgctccaggttacatggctatcagtgggaagctgggtggggggtgtggacaggtctgtgattcccagacccatcctcagatgcctcctggagcctctttgtgggagagtgcatgtgtcatggcgagtatgtggctctgcgattggaggaaatgtcaccggaccagtcaataggtcttcctctttacaattagcttttgtcaatgtacgttttttctttagtccacacaaccttttaaaatttatttatgatcgtagccctggcctttatccatcgaatcctaaagtgatctggctgctcatgaccaggggtgacagccaggatgcttttcttggaccaagaaacctggcttaaatgacagccttgagccttgctttggagcagtcagactctctggggatactgttactattagtgagcattatttgctgcagaaattgattccttctgccgtacagtaggccagggaggcctccaggtgccttcggtgggggaaggattttagttgctcaggccaaataaccgagactagctccctgcaaattccatggagccatctatacttctgagtatatcttcaagtgctactcctaaatttaaggttcttccacttttcatccagttcacatgtagttgagggcctgcctgccttgagcctgacacagggccagttgtgagcctggaccagcacccacagccaggtgtgagcctggaccaccacccagggccaggtgtgagcctggaccaccacccagggccaggtgtgagcctggaccaccacccagggtcaggtgtgagcctggaccaccacccagggccaggtgtgagcctggaccagcacccagggccaggtgtgagcctggaccagcacccacggccaggtgtgagcctggaccagcacccacggccaggtgtgagcctggaccagcacccacggccaggtgtgagcctggaccaccacccagggccaggtgtgagcctggaccagcacccagagccaaggtatgagcctgaaccaccactcacggccagctgtgggtctagaccaccacccatggccaggtgtgagccaggatcatcctcccagggccaggtgtaagccagggtcatcctcacagggtcatgtgtgagcctggaccaccacccagggccaggtgtgagcctggaccaccacccacggtcagctgtgaatttgaaccaccacccatggccaggtgtgagcctggaccagcactcacagccaggtgtgagcctggaccaccacccacggccaggtgtgagccaggagcatcctcccagggccaggtgtgagccaggagcatcctcccagggccaggtgtgagccaggagcatcttcgcagggccaggtatgagccaggagcagcctggcattggccccatgccacatgacactctttgtcccttgtcagcattttaaaccaaggtgaagaggtcccacttagctttgtggtatctgttttataggaatgaagggggtactttaacaagttcatcttagggttctcatctgcattgttgcctgtgcagttacaccactcatgcctacccagcataattaacagtgtgacctacgaaaggtggggcggggctcacaggaactaaccagggattcctgtgtgtgaatgttattatgaaggtgctttacctcattagttatttgtgatgaaaatactcttaaaagacctgctataaagtgtcaataccaaaagcttctcatgtcattgacattaaaagactttttgtattttttttgagacagggtcggctctgtcacccggggtggagtgtagtggcatgatttctgctcactgcaacctctgcctcccaggctcaaaccactctcccacctcagccgcctgagtagttggaactacaggtgcacgccaccacgccaggctcattttttattttgatagagacagggttttaccatgttgcccaggctggtgggcaatttgtccacctcaatctcccaagatattaagaaactgttaaagaatgttttgccactaaactattgttttacaacatttcattatgaaaaatttcatacagaaaagtggaaataattttatagtgagtacttgtacactgattgccaagattctgtaaacaatatttccctctgcttgtgtcatctttcatttgtccattcctcgatttattattattattattatttgaggtggagtttcactctgtcgcccaggctagagtgcagtggcgcaacctcggctcactgcaacctctgcctcccggattcaagtgattctgctccctcagcctcccaagtagctgggattacaggcatgcgccaccacgcctggctaattttgtatttttagtacagacggagtttctccatgtttgtcaggctggtctcgaactgccttggcctcctaaagtgttgggattacagatataagccatcacgcccggccttgtattatttttcaatgcattgcaaagtcaacggcagactgaaggactgccgcatgcatagctgctattattaactcgagatcaatattgatttactgttttgtttttttatttccagataagcattcataaacagtgaaaagcacaaatcatcagtgcgccgtacgttttggccagcactttattttatggaacagaggactagatgaccagtgctgtgagtgggcaggtctgtctcctgcctctcttatttatgttgtatgcctgacaccttcctcatgccgcaggaccagccgggaccggggagaggctgttcgaggaacacaggatgcatattcaggcaggaagttgttggggttaacatgagtggaccctagatttccctgcctgaagggggccccgtgttagtttcctgtggctgccgtaacagccacaaactaggtggcttaaaacaacagaacatcattcttttacagttctggaggcctgaagcccaggatcaaggtgtgcccagagctgtgctccctccagaggatagagcaggattcctcctagccttttccggcctctggtggcccctggcaatccttggtgtcccatccagctgcatcactccagtctctgcttctgttatcacgtgccctcttcccggcatgtgtcttctgggtgggtgtgaattttgggaggacactattcaccccagtacaagcttgagcctggttgcggggactgtgtggacctctcccacaggtctgtccccctaaagggagcacactggcagtgtgcccacccccaggccagcgggcagcccttggcagagggtgtgcctagagcttggatgtgcgggtcggatgtctttgcctctcttctttcctgtcctggtttcagctggaaggatgttcagatatgagaatgggaaaaggcggagcggtgtttgttcatgagagaggactgctctgccctcagctggcccatggccttcccttccagagccccaaagggccctgccctcagctgggagatgggccctgggcgtcatttagcttgagcacctgcctggtcatcctctgcaagccccagtcactgtccctgggagaggttctacagctccctacccacacctgcagccttgcttctccccgtgtctgttcttgcgctgtccatctgtatgggagctgtcttttcatgggtctcaggtctgtgccagtatgcagctggggagctgtgaacccaggtgtgttttcaacctgcttcccagccggtcgcatactgtgggactggtggactatttagaggtctagggagtggtggggagaaggggctgcaggggaagagcatctgatggtggtggccaggaggaacgtggcactggggggtgggcagggtgggaattgtccactgtggggggcggctgaggaagccaaggggtctgggcctgtaggggaagtgggagaggagagaggaaaggacaaagatgaaggtggaaagggggaaggtgacagtggcctctcaatatgcggaggggcttgaaaacaggagggctgtgcactagaggatgcactggcgcagaactgagacatttctggaaggtggctttggagccagcatccttgctggtatgtaagaaatgccaggtatatgccctctgggaggttgtgtgggctgggtgacactgccagttcccttcagtctctggggctctgactcagtggggattcccacactgacctcgtgatgtctctagtgccctcagggaccctggacagcatcctgagctgcagcctccatgaaaggaggcccctgaaggtggcaggttgtcagatcgaggcccacatggaggtcattccttactgggcttggtgatgccccgccagctaacttgagggcaaaggcgtgcttgcaggttgatgagcagctctgtgggatccgagctgctgctgttcgtgggctgcctgctgtgggccaggcactttgcggagcatggacgcccgttctcttactctgttgatgcaacaacctgttgaaccagagtttttctccgttttatggagaaagaaactgaagctccttgatgaagtgaagccatgtcctaaagccgctagcacttagcatgtggcgggcacctggcatgcatgcgtgggatggacatggactcgtggcagaaccgagacccagacggcaggaaggagaagctgtgtatgtgttggaggaggatgtggatcgctgctggctcagtgccggttgtaaaaggaagcaattgcagttatttcttgctgctgctgtaacagattacaacatacttagtggtgaaaaacagcacacgtcattctctttgaggtcagaagtccttaaatgcatccacaaagctgtgttctttctagagggtgcagggagaatccatttccttcccttttctagcatccagaagccacctgcagtccttggcttgtgggcccatccttcatcctgaaaggcagcagcggatggagcatcttctgacctctcacctctgctctatcatcatgttgtcccctagctttactgctttttcttagaaggatgcctgtgattacattgaacccacctggatagttcaagacaccctcacctcaatgccattaatttaatcacaccagcaaagttccttttgccatataaggatatggcagcgtattcataggttctgggtgttgggacatggacattttgggggacccatgattcagtttccctcacgttgtcagagaccatcctggccaacatggcggaaacccgtctctattaaaagtataaaaattagctgggtgtggtggcgggcgcctgtagtcccagctacttgggaggctgaggcaggagaatcgcttgaacccaggaggcggaggttgtagtgacccaagatcacgccattgcactccagcctgggcgacagagcgagacaccatctcaaaaaaaaggatcttggaggaagtacatgaccccgagtgggtgcctctcctggccaggtgtccccttgtgtatgttatccttgaatcttcctagcagccttccaaagtaggcttcgggattcagttttacagatagggaaacttaggcacagagagacttttggtggctctataggcagtaaagggcaaaatggaaagcaaacctggcctcttgtacctctgagccccgaattctgccctctgcccatgtgagcatggtctgtgagcaaaccttcctgtggataggtttggaggattcgaaggacatccctggaggggctgtgcccaggtagggtgtgttcactgtgcccctgtgtgagggtttgtagtcttacacctttgccaaaccctttctgggttttgcccctcacaggagatgcaggtctttctatggaacctgtaggttctgagaccgagccttgggtagtttttatttcttaggctctctggagttctcccaaatccccattgccaatcagtagctgaaagtggatgctattgtttttccgattgctggtctctttacttgtttagtgaaaacagcaaaaatttagaatgtttatagaattgaacacgaaaaccagagttgtatatctaaggaaaacatggtgtgactggcccgggatccaaattatttgcagcgcctgtcgtctttgttaactcttctcagttctctttttctttccttctctctgtttctttcagttttggtttttctttttgaagacggaatcaaagggaaattattttcattttcttcacagggagttcccaggcttccccctagcctttgctttacttgctgtgcccagttccatgagaaggagttgttacatttcttcttcctaaagcagtgatcggtgcttctgccctggtggagaaggcttgagcagtccccggctagcggctgttgccacctacaagcccctgcctccattaggaagccatttatttatggggcctaggtaggggcaggaggttcctttcaagaaaacaacagattgcttaatgctggtctccctcttgctggccaaaaggaatgttaaagccagatcattatcttgttataatgtgtgagagagtcctgcttaaaaagaggacaaagacttatcacacaaatatgcttgggtcccttttaatgtgggaagcacattccatgtaaaggcagcctcccgttcctgtctttctttgcagagactttcagaagaagcaggtgccctcatcgagcattcctttgatcacttgctaggtgtgtttggtggtggtttcagtgctgctctttggcctcggcattagagactagttttttaaaattaagtttctctgggtgtcccaagattcttttaaatccaaagaccatttaggttccagcttccttgagcctcggtttcttcctctatgaagtggagataatggcaaacatctgaaaacattttatcaggatttggtgtgacactacgtgtaggtgattaggccggtgcctggcaagtactgctgctcgaggaatctcaggtatctgcattcaactgttctcacacggctataaaggaatacctgagactgggtaatttataaagaaaagaggtttaactggctcacagttctgcaggctgtacaggaagcgtggcaccatttgctcagcttcagggtggcctcagggaacttacaatcatggcggaaggcaaaggggaagcccacgtttcacatggttggagtaggagtaagagaggggttgcagggggctgtgccacacacttgtaaacaaccaaatctcgtgagaactccttatcacaggaacagcaccaaggggacggtgctcagccattcatgaaggatccaccccatgatccagtcacctcccaccaggccccacctccaacactgggggttaccgttcgacatgaggtttgggatggggacaaggattcacaccatatcagtgtcttatgcatagtaaaacattttatgaatgattgtctctatgtgctgtagctgtatatcctccagtatggtagccacaggccacttgtggctaaatttaagtgaaatgaaagattcagttccttgggcacactagccacgttttccaggcctgacagccatgtgctgctgatggctgccttattggaccacacagatagtgaaaggtttctgtcacggctgagaggttctgttggccagtgcttgttcagctaaggttaaaatattaaccacctacacttcctttgtatctaaacccatttccttggttcttttccaatacttatttcctgggtagccctttgtgttacagggaaattgtgaattttcatattaaaggcaactcacctgggatatggcttgctgaaagggaagaggcagacgctgtagtatatagtcagtgctcaatgaagggaaaggggcttcacttccccaacagagtggccctccaaaagggtctcactttgtagcccaggctggtctcaaactcctaggctcaaatggtcctccaatcttggcctcccaaagtgctgggactacaggcgtttgccaccacatccagctgctgctccatctttaaagttgtcttgcccacactttgtgtgtgtgtgtgtgtgtgtgtgtgtatacatatatatgtatacacacacacacacacacacacacacactttttttttttttttttgaagcagctcgtctttattgaaacttcttaaaacatccaacctgattttcaaagctcacagctctgctcctggctttgggggcttagcctctaatttgggtctgaactttattgagctttgcttggcaaatgcaatgaagaaagtgttaccaggtggcattactgagagcccttgagggtggggggagattgcgtgccgtgccctgtgtgtgtgtcagctgactcttgacccccgcttgcagctcagcatggctgtgtgacttaggactttctagatgcacataatttcaggagtggtatttgagtgcatttggcaccaggcatggggtggctgagccccatcagtggcacctcactgttgctgtgcactggtggggtagttcttcaggcagtgggggtgatatccatcagcaggttccaccactgggcaccaccacccttcccccgcaggtgctcctctgtcctctagatgtcctgcctcctgcgtcctttgcaccataccccacaggtcctgccacccctgctcatcatctctcttgctgttttcatctctgaagtccctcctataggggcttcctgcccacttctctgcacctgggcttctgccccagctaaaatctcacctctccagaaaatagtggccaacttccccatcaccttggctagaagtcacccctccatttggaatgccacagcagctgcccttagagtcttcctgctctggcaggccgttgtgtgcatcacactgacttcagccccacaaaggaggacctactgtgtgctcagcgtgtgcccagctctgagtgaggctacacatgtgaacaggaccagctcggctgcgggagctcctggtgttgggggcaggcaagcagacattctgcctgagactccttttagaacgtgaatgagaagcagcacgagagttgctgtcagactccccgattgctccatcttttttcttcttcttcttcttcttcttcttcttcttcttcttcttcttcttcttcttcttcttcttcttcttcttcttcttcttcttctttcttctttcttctttcttctttcttctttcttcttcttcttccttttttttttttttaaagatagaatctcactctgttacccaggctgcattgcagtggcacagacagctccctgcaccctggatctcctgggctcaagtgctcctagagtagctgggccacaggcatgtaccaccatgcctggttacttttttacttctttgtagagacagggttttactttgttgcctaggctggtctcaaattcttgggctgaagtgatccttagcccctcaaagtgctgggattacaggtgtgtgtccctgcacccggctgctgctccatctttaaaattgtcttacccacacgtacttacattttttgttttttaaagcagcttgtttcattgagacttaccaaaacattcaacttaattttcataggaaaaagtcctcttatttaaattcttatttagtcagtgtgtataatgtttaatcaaatgatgtcattatagttactattattaaaactcccatttcatcgatttgtgtgatatttaagtgatgtgataatagttagaaggaagcgtatggaagaaagtgtggcaacaacactgctgacactggaggacagaattctggtctctgcaaacggcatgagtgcgccccatgagtgcgccccatcaccagcaggtgggcttggcaggtgtgccccggctcatctggagagtcaggtcaggggtggctggtcaggatagctgttaccacatggaatgtgcattcctaaatccaaatgcttgcctcaccccagtgctgagcctggccagctgagaggctggagaccccgtgtattcatggctggggctggctcctggcagagcctcccagcgggttggcattctgttcagctttcccctgctgtcgcacaacctttttattgacccctcccttcctgtgttggccaggagcccactggcttcaccagaccctgactgttagctggtcagggaggcagggcctgggtgccttggggcctgtcctatctgaggtccacagcctgcagggacatcacctaaaagttgtcatcagcttcattagcagcactcaggcccagctgggcattcagctgtgactgcattctggcacctgaagcatctgggcctggacggactctttcaggttgtttggataatcatcctaaaaacgcctctgagatccacccccactcctgccatcaggcattaaaatcttccgaacagaaaagctgaaaatgttcccttaccttaagggaaaggcctcaatggattgatttaattgtatgtgtgaagcattttttcttctttgctaaatgcataaactgtataacgaaatgtaattagtgaaggtgcattatctgataaagtaaatctcagccactgggaagagccctttttggcagtgtagtttctcttttaatagctgtgatcagattatacctttaaatctctttaaacacttcccaccactgaagtctttggtttccttgatttgatagtttttaccaggctgttcaaaaagtcaagcagtgttcttttaggtcctttttggttctgtgcgacagttaatgaatagtcatgtgcatttgacccctaaaaggaaggtcttttgctttttaaagagactgtattaagaggaataatggaccaagtacaccaggagggaatgaacgagaaaaataaaagaaagaaaatcacacaagaccaaataactaattttgaatattttctgagacctttggtttagaatctaaactttgttgaggctgggcgcagtggagcacgcgtgtaattctagcacttagggaggccgaggcaaatggatcacttgagctcaggagttcgacaccagcctaggcaacatggcaaagccctgactcttccaaacatacaaaaatcagcgaggcatggaggcagacacctatggtcccaggtacatgggaggctgaggtgggatgatcgctggagcttgggaagttgagggtgcagtgagccacgatcgtaccactgcactccagcctgggtgacagagtgagatcctgtctcgaaaaaacaaaaacaacaaaccaaaaaaaaaggtgacattgagaataaagagatggtggttggatttgtggctatttttccagctgctcaatagttgtacaaaatgtagcttgatatgatgagtgtttccaaaattcctaaattacatgtcatgtttgttgattatttgtatatgttttaatgtgtattaaaaagacaccaaaggtgtgagttcataaatattaatacttaggataaacttaagatttgaaagaatttaaagttgaagagagttgaagtaggtgatagtttaggtggtctttgaatgtggcagaagccacaaaggtggtgcatgaagtttgggaaaagctgagccgaggaaactggaaggctttctcctttaaggaccagtgtgattctaggctgttgaatgatatcttcagatacccgtttgtcctgttgctctgcctcctccgtgagctgtgctcacgggtggccaggtgtttgacactagtatccagagacaaactcagacatgcgccctgggctctactcctggaacctgggagaaagggctgccgtagggaaaggtgtgaacgcacaggtttgcatgcctaaaattataacacttttttattgcaaaggttcttttcagcttttttcttttcaagtaaatggagatgtgtctttcttctgtttctggtgtcctttttctttccgtaaaataaccacctctttactgagattggggagggaagtctgtctccattgaattgtctgctgtcgacatcagataagacattcccttctgttctgttttcaaaagaagatgatgtgaaaaaaaagtggcatttttatgagacgtgttgtcccctcacataacttcttggatacctttcccttgtcctagggacctaagcctctctgggtgtcactgtccgtgcacagcctgtgataagccgctgtgtggcagagaccaactgtgggtgatttgtcgctccccagagcccggttgcaacaggaggagccaccaggctgggagggcaccaggcaggaggctgggtccatacctggcgcaaccctgggcctcaggttccccagtggcaaaggtaggataggggctttggtcgcctctgtgctatgagtctttgtccagtttgtcagtcaccatattcgttttactctccagtcttttctataaaagtgtttgggggccagaagttgttaacctggttcactagaagctaatgcattgattatttttgtgtgtgttgtactcagcacgtgcttctcagtgcgctgtgtcctcatttgctgtttcccctgaagtttgacgagtatggtatattctggtcaccaggcaggtggtgcttggggaatatctcctctccgtgtgctggaagcattgcctgattttaatgaggtgactcactgcagctggttttaagaactttgttgcaggtattggttgactgcagtgttcccaagtggtcgtgctgtgccctaaaggctgctagaacctcaggggccgttgagggcaggttcgagtcccgcaggcaagaaggtggaactctagagaggagggggatgccttggcctgggccccctctgagggaggactgtcgcccctgctgctgggagcatcattagctgcagctcctcatggagagatgcccagcgtaagggtacatcctgtcagaccctcttcccgtgactgttcttccagggtgtgaagggcagaaaggtggggccatctggacccatcatgggacaattctaatggcctctccattgctccctgttgggttggcgagatggcctcaggtttgcctggcagttcagcctctctctggccagttctgcttcttcccctccttccacaggtatccatcttccctccataccccaaatgccaaactctacctctgcatcttcaccaagaaaagcatttctgttgtcctgaaatatcaggccttcctgaacccccttgtacctctgtccagtggaagtagaatgccagccacatacgtcatttaaagttttctactagctacattagaaaaaataaaagaaacagatgaaattaattttaataaactgtttaatccaacatatccaaaatattatcctttcattgcaattatctggaatttgtggacgaggtttgctataatcctgtttggtactgatgctttgggtggtgctgtgtaatgttcattcatcgcacatttcaattcggccacattttagtgctcagtagcacctgtggctggagctactgtattgggcaccacggccttagggttttgattaaaaccccattctcttgaccttctgcccaaagcctttgccagatgagacactgcctctcgctgaatgcctgcttggagcagagtcctgtgtttgtttggaaatgatcggaagctcctgtgtccctggtcgcttgctggagtcggtgggagctgagagtcccttgctgcccggagcatggctgtgtggctgcctgactacatggttcttcccccggttatttttgtttgggcagttaactctgagcattcggaacattcgccgagtggaacgtgtgtgtcgtcatcccctcgaaggcttggctgattgagccagtaaacaaaaagtgcattcaacacaggcttgtctgctggcctcccccgggagagagagtaggtttgctattcctgaaatgtaatccctccttcagcgctgcacaaaaggcccatgtctgctcgctgggacctgatagttcgcctttgtacggatgaaaaaaaccaaacactgagcctggtctgagcggggctgtttgttgaggctcctgatgcagacaagggagcagtgtctgcacagggggtctggatcgcacccgacaccatccaggtgcctgcgtgtgctggtcccgccatcaggacttcccctcgtgaggagctgggtaccactgttatcctgcctgctggtctgagggtccgagcgtgattgggagcagagacaagagttccagggcgagcctcagttctgggaccaccattgaccagtagagctataaaggacttggccaccaaggttggagctgagccccccatgtcatgaaactgccactgtcagagccagcctgagctccacggtgcccgtctcctacctgcactgtgcccccacacctttgttgacaaggacctgacctctcctcaaactacaacctaagaaccacaatgcctgttccccttacctgcccccaggtgtcctgggagaagtcagtgacatgattaagacctttaaaaatgatggtaagcatgtgccagtgtgaatgtacttagtgccactgagctgcacacttaaaagtgggtagaatgatgcattttgtgtgtattttgccacagtttaaaaaattacagactggacgcagtggcttatgccaccccagcactttgggaggctgaggcaggcggatcacttgaggtcaggagtttgagaccagcctgggcaacatggtgaaacctcgtctctactaaaaatacaaaaaaattagctggatgtggtggtgtgcacctgtaatcccagctacttgggaggctgaggcaggagaattgcttgaacccaggaggcggaggttgcagtaagccgacattgtgccactgcactccagcctgggcaatacagcgagactcagtctcaaaaaaaaaaaaaaaattttttttttacaataagctatttaaataaacatttgtgtatagcccaatagtttttcactgttgagggtcaaaattttacctttgtctacctatctgcctgtccctctagctgtcagtcacacagacggatatagatatgtaatttgaattacttctgtttctttctctttgctagtctaagtcttagaagaattaagggttttcttattactggctaaagttaaaaggtacccagttgaatcatcttggaaagaaaaccaggaaaccaaattatcaccatgaagcagccttccccagcttgtgtcacagtggagcgctcatttttgtggctggtttactgtcgtaaaactttcgtataagggcgcactgtgtcagcccctgcccactgagggcttcagaaatgaaaggcagttctatttatgcccagctggcttctgcagagccgggctcagtttaccaggcgacacttttgctttaatccttcctggtgtgacgtaacctttcactgtccttcccatgccctgaggtctccagcctttttgttaaaacaaaacaaaccttatttgggcatgatcaatacagctgtgggttgcaatcccagggggcgacttggctcttttgttgttgtcgttaaaaaatattgaggcaaaatttacataacataaagttaagcatttaaaagtgaacacttggccaggcgtggtggctcacacctgtaatcccagcactttgggaggcctaggcgggcagatcacgaggtcaggagatcgagaccatcctggctaacacagtgaaaccccgtctctactaaaaatacaaagaaattagccgggcgtggtggtgggcacctgtagtcccagctactcgggaggctgacacaggagaatggcgtgaacccaggaggaggagcttgcagtgagtggagatggcaccactgcactccagcctgggcaacagagcgagactccatctcaaaaaaaaaaaaaaagtgaacacttacttagcgtatgcaccacatggtgtaaccacccacccgtctagttccaaaacaatttcatcacccccgcccaggggaaaccccatgttcttcagcagtcattgcccatttccccctctccctagcacctgacgaccgccagtcttctgtttctgtgggtttgcccattctggacatttcatataaacagaaccatacaacatgtggccttctgtgactgggttctttcccttaatataatgtttttgagattcatcgagggtggtagcatgcattggtgcctcatttctttctacagctgaatgatatttcattgtatggagggaccacattttgtttattcattcatctgttgatgggcgtttgtgtccatcttttggctacagggaaccatgcagctatgaacgtgcgtgtacagggatttgcttgagttgccattttcacctctttggagtatatccttaggagctgagtggttgcttggaaaggtaattgtatttgactttgagaagaaccgccatactgttctccccatcattagtggtgagaatgaagacgtgccggccgcttacattttgtcgggttgatttcttcattttcttgcatctccttcacagtggcagtgctggcttttccctcggtgcttgttggaggcagtgggggagggagggttggggagggtgcgctttctactccaccattctagtgtcttctagaggtagagtcgagtgtatctgagagtgcttctctcttagaataaatgacattaacatatgaaaaaacagctacttgtgcctgactatgggcattttcatgtacaggagttcttgaagctgagtttattgagaatggttttgttacctgctgatagctatctttttgtgtttagttctttttgacttctttggcctctaatgttttgacagtggcacttagatgacagtcagcaattgcaacagtgaatgaaatcacacagcttgagttcaaggtggaaagagaaaaaaatctagagaggatgttatctgacctggcatgagaggtgatcatcctgtctctgagcagtgggttcttgctctcgaccttagggtgtaatgtggccctgctccttgtatggtgaataacttgtgactgctgtgtttaccacatggcttgacagtttacaaagcacttttgtgtatattattgcacactctgatccttacagtaatcccgtgaggtgtggagtggaggctttttaagaaacagagactgctttgggaggcataggtcggtggatcacctgaggtcaggagttcgagactagcctggccaacatggtgaaaccccatctcaagcaaaaaaaaaaaaaaaaaaaaaaaaatgccgggcatggtggtaggtgcctgtaatcccagctacttgggaggctgaggcaggagaatcacttgaacctgggaggcagaggttacagtgagctgagatcatgccattgctctctagcctgggtgacaagagcgaaactccgtctcaaaaaaaaaaaaagatggagggtgaaagagatggagacttggaggttgcacactgttcagtggaggtgcaggacttccagcttggtctttgtccccagctttttaagaattcaatcatgaagaagattgtttatattgttcttttttttttttttttaatggattgagtgtgaaactggtggaaatatattccaggaggccatttaaaaagaaaataggctgggtacagtggctcatgcctgtaatcccacactttgggaggccaaagcaggcagattgcctgaactcaggagttcaagaccagcctgggcaacgtggtgaaattccgtctctgctaaaatacaaaaaattagccgggtgtagtggtgcatgcctgtaatcccagctactcaagaggctgaggcagagaattgcttgaacccggaaagtggaggttgcagtgagccgagatcgtgctactgcactccagcctgggcaacagagcgagattccatcttcaaaaaaaaagaaagaaagaaaataacaaggttaccatggagatcctgcagtcacggggacattctcaaacatcacaatgattggtgtcaaaaattgaaacctggaagaagaaaactggactatgattgttgaattagcacccggggaggttttattattctgtgttcaccccaggaaattcttaaggcctgagtgttgatgtccttcagcaacccaacatattaacgcagtctttaggagacatgaaatgttccttccatccagggaagacgtgattgcagcaggcaggagttgatagtgatgctatggggctgtctgctctatacgaggagcagagacccctggatcctagtggtggcccctggtcaccagatgtgagccctggagcgcatgattgtggttttgacccattcttgccccagcttgagcctgacctttggcaggtccaggagtgtgctgagtctttctaccccgctgcgtggtgctgcctgccgaggtggtgtggctctttgtgctggcatttagggtgtcactaaagcccaagaccaggattgcttgtcctttgcagtgtgctggacaggagccacacagtgtagaagcgacttgccctaaatgcctcattgagaagcatgggtgtccccttagacatcatgggagctcattgcattgatgaagccctcttgagtcagatcgtggggttggttggtcatgcgtgtaattatgtgttgaggtttggtgccttgagattaaagggatgccacattttgagcttctcagatataaaagaaggattctttgggggaggacctataaatatttcttaaaagtgttttacaacaaaagcacggagtgtacttcagaaggaaggatttagctgctggagtgatggccgaaggagcctgggagaagtcagagagagggggctcgtggtccttcttgggctctcattgctgttagcaggagttggcacttgagtcccacgtcctagcctcccggcatcacagccttatgctgcatttcctaaagtgctttctagcactgaccgactccaggaggcagcactggcaaggattttggtgagcctttgatggagtgtgttccggaatcgggaggaagcttgtaaggctgctttccactcattttatgttgttgggatttggctcggaacctgccaaggacccctgtgtgttaaagttgaaatagttccctagtaaactggccactttcagaccagctgcattttctagaataaacttcatttgtccttgactcataaagggaaaagccagaagccaggggctctggggcacctccaagtgggccagggtcaggtgtgggtcctctgcctgggttttaatgtaaactcagggttttaatgtaagaacctgttttgtttgcttttgtttttagaccaagtctcactctgttacccaggccagagtgcagcagccataaacatgtcttactgcggccttgaaccttggtcttaaatgatcctcttactcagcctctcatgtaactctggggtaactccaagtgggccagggtcaggtgcgggtcccctgcctgcgttggtctcactgccatataaccccagccatggtgatcttaccagagaaactcatttgaacctatgcggctgcttcaggccggtggttgttggcctgataggaagagagcatactcagcctcatactcagcctctcgtgtaactgggaccacaagcatgcaccaccatacctggctaatttttttttttttttttttttggtaaagatagggtctcagaggtttggtgtggtggctcatgcctgtaatcccagcactttgggaggctgaggcaggtggatcagttgaggccaggagttcgagaccagtctggctaacatggtgaaaccccatctctactaaaaatacaaaaactagctgggtgtggtggtgtgcgcctgtagtcccagctactcgggaggctgaggcagaattgcctgaactcaggaggcagaggttgcagtgagccaagattgtaccactgcactccagcctgggtgataaaatgagatcatgtcttaaaaaaaaaaaaaaaaagatggggtctcactttgctgcccaggctggtctttgaactcctggacttaaatgatcctcctgcctcggccccccagagtgctgggattatgggcatgagccaccacacctggccagggcctgtttttaattgttgaattgcccacattgcattatcaggattgaaaacatagtagtggcacagcctcctggagagtgcagatgtagctcatggtacgcttggggtttctgcagagcatgacatcaggctgtcttccagccttgcctcactaagaacttgaagcatgaccctcaataaaccacttttttttttttttttgcatggaaatctgtgaagaaagaaggccttgggaaagcctgtgtcctggcctgtcattgaacgtaataattacattaacaagtgaatgatttaagttctgcactctttgttcttataggaacaaggttaagggacgactgtgttgtgggttgaaatgtgtcccccaaaatagtatgttcaagtcctaaccttggtagctgtgtgtgtggccatacttggagatggtctttggctgatgtaattagttaagatgaggtcatactagattggagtgggtcctgatccagtgatcggtgttcatctgagaagagggaggttgtgacagcaacacgcaggaagggccatgtcacgatggaggcaaaggtcggagcaagctgtgctaggaagaggcaaggagggatcccctcccccagccttcataaggagcacggccctgcagacaccttgatttttgaacttctggcttccagaactgcgagggaatacatttctgctgtttgagccacctggtttgtggtacttgattacagcagtgctaacctccccacagttacccacaacctctgagtacctgtttgccgctcactcctccctctcccattgccacgtggtctctgcttttattcgttttctcagcggaaacttggaggccattggctattgtgtatcgtgtatcgtggctaagtcattacctttttttttttttttttttttttaaagaaaacccaaaaccaaaaaactccttttaggcgtcacccccctacccacttaggtacagtgctgctgctgctgcccccggcttcttgaaaccttctttctgactctctgagagagactcttgtggatatcttgtagctctggcctttttctttagctctggtctttccctctcttggctgtggattcatttcttatcgctgttgtaacaaattaccacacactaagtggcttaaaacagcatagatttattacagttcggaagctcagaagctccaaatgggtcttacgggcctaaaatcaaaggctgtgctccttttggaggctgtggggtagactcgatttccttgctttttccagcctcaatggctgctgcattcctggccttagctctgtatccctctggcctctgccgtggtagctgcgtggcctgctctgaccctgacctcctggaaggaccctgtgattacattggacccacctgtgtaatccagaatccttgcaaaacccccatctcaaaatctttcacctcttcacatgcacacagtggctttgccccgtggagccacatgctctcaggttccaggaatgagtctgtgggcatctctgggggccactgttcagcctgaatgtgttctgaggcttagtattttgtctctttgagttctacattcattttgatccttacatcatcatctgcaggggataggtgattctcaatctaggtttgggaagaggaacttaaggctccacagaaatttgagtccatttttacttaaatgtactttttacctttagaaaaacttgtaggtaaaaaccaacaggtgcattcaaaccaatcacacgccaacttttaccacccaccaccgtcttaccttctgctgctgtgttggctcattattttgcgcggacccgaaatgaaggctgtctcgtcctttctgtttaattggagcgcctggagagcacaggtgagttgttaaaaacccggtgaatcctgcatggatttgcaaaccaaactacatggagaaatcagttaaattctcaggtttcagggttgcagctgccactgagaagtgtatttaggcaggttctggcaacagacttggtgttgggcttgagtgggaaggggatttaggagcttcatgagcgagtcaaatgcaagttggggaagtggctgaaaaaaatgcctcctggaaaaagcagtaaatgtaaggatttaggtcggccattgtctccgtgtaagtcaacactaccttgtgtgtgtgcgcatacacacaaagagggtgagccctcagcccgccatacgggcatgttatccagaagagaggagagagaagcccgctgcactctccactgaccagaccacccactttgccctctgcacgctcactccacgaaggatgcaggtgggcacactgctacaaccccctgggtgtgtgtggagttgggaaagagacggatgttgagcctgaagaggctgtgacctccccaaatactcggactcccctgtggaaggcaaggtggaggcagctgttatgtggtgtgttggattcacagcagtcaaggctgccacgagcaagtattttgagtgctccttatgtccatgcagaggctgactccagaggatgctgtgcacaggcctgtgtgacctgaaggcccttgcaggctgaggtctcttggtgataatccacacactgtcctgggccttggttttgcagcatttccaacttgggttgtcagagtgagactgtgcaggactgccccgtacagtacggcttctatgtgtgaacaacacagaccactaagagatgtgacaaagctgttccatcagaggaaacatagtctgggggacaaatcctcccattcctgataggacaggagggagcggttggctggggaagacctgagtgagggagctttcttgaggacgggttttgtcggagtgtagttcatataccatgcacagcctgtcagcatacagcttgaatgaactcacgtgtgtaaccagatcaagaggcagaatattactagggtggcagttttgagtcccatgaaaacaaacacatttactctgtctagctccatctctagttaattctagtgcagtttaaatgctcacaaaatccttatttgaatggatgagtcagtggtttgaattgaatagtttttgagccatttgtatggagaaggtattacccaaacagaaacatggtggtgataatagactcacgttgatttcacttgttaactgagcaaacacctcttgtctcctcattctgtgcagagcattctgggtggaaaagtcggaccaagtttctgaggggaggacggaggagtcctgtcttttaagcagatggagctgcaaacagccagagagtgacagagattgagaggcagcagctgtcttttcagttgcgcatcctccttgtagtaaccataggtgggaggctgggattccgagctcagggcagcgggatgctcaccatgtgctgggtgctgtttgaaggaccggaaatgcatcattttgtttaagtctcccaacaggccgggtgcggtggctcatgcctgtaattccagaactttgggaggctgaggtgggcggatcacttgaggtcaggagtttgcaactagcctggccaacatggtgaaaccccatctctactgaaaatacttaaaaaattagccgggcattgtggcaggcacctgtaatcccagctactctggaggctgaggcaggagaattgcttgaacactggaggtggaggttgcagtgagctgagatagccccatttcactccagtctgggcaacaagagcaaaactccgccttaaaaaaaaaaaaagtcacaacaacctgtttcacttaagtacgggcttaagaggccagtgtgagggtcaggagctaacactcagccccacaggggtctccaggtcctgctgctccttccacgcctgcccggtccctgcagcttcccatgaacggaagggaagtcatctggcagccttagaaatgctcatttgtggccgggtgtggtggctcacgcctgtaatcccagcactttgggaggccgacatgcgtggatcacctgaggtcaggagtttgagaccagccttaccaagatagtgaaaccccgtctctactaaaaatacaaaaatcagtcgggcatggtggcacatgcctgtagtcccagctactcgggagactgaggcgggagaattgcttgaacccgagaggtggaggttgcagtgaaccgagattgtaccactgcactcagcctgggtgacagagtgagactccgtctcaaaaaaaaaaaaaaatgcacatttgcatcagtgatttcattctgccagtgttaaatgaaaattgttacagggaagttagttctcaggatccattggggataaaataccagaacaaagggaaggctagggtttcttctcctccacttctctacactcaaccacccttcccatttctttaatgccaacgcaccgtcaccttcctcacccttgatgctgagacattcaagaccccttagaacccaggactcccggtggctgctacaccctggtcatatctggcctctcacacttaacccctccaaatagtaaaatctggataaaaaaaaattgggttttcaaagagctgttaacagtcttctgtagctgagtttttaagaaattataccatattcattttgactcctaattcctttttggaaaaatttctgaattttgttaaattcacggagtaacacaaatggttatctttctgttcctttaaaatctatctttgatttggagattactagggtaaattatagatcaagaatatcatacatgtcattattcactgaaatttgcagtcagctctgtagacaccattctgcctcctttacccagcacgttggggattgtgattactgacgagacctttaaagaatcttccggctgggaaaggtcccgagtggcctgctttcctggcttatttgagaattttgcctggcccctaggtttctcagcagtctgtatttcccactgttcgttgtgctcgtgctgagttgttttcctatcgaaatacaactgtgttttattgaccttgaatagctctgccagatttcacaggtgctccttgctctgggaggccctgaaatgccctttctggtccctcttgggttcagcgctcagggcctctggaaggtttcaggagccccgatgctggtagaaaaggagattttgagaactaccagttaatagcttattgttttgttttttttttttttttttttttttttttgagacggagtttcgttcttgttgtctaggctggagtgcaatggcgcggtcttggctcactgcaatccctgcctcccaggttcaagtgattctcctgcctcagcctcccaagtacctgggattacaggcgcctgccaccatgcccggctaacattttgtatgtttagtagagatggagtgtcaccattttggccaggctggtctcgaactcctgacctcaggtgatccgcccaccttggcatcccaaagtgttgggattacaggcatgagccaccgcgccagtgctggtcccagttaatggcttatttctgaatttcccatccaaccgaacttttcaagtgtaactcctggttcttcatgggcaggaggaccatgtccgctctaggtggcttgtcctctttgggaaggctctctttgcattttaaaattattctggatgacagaatgaaaccctgtctcaaaaaaatatagatagatagatagatagagatatagaatggagataattggaggaagcagtggtcattttagtgtttgtgtagccaggagagcacggccaggactcactctgagttggggtagccagaattcagagcatctagagagagagagagagaggctcacctcttaggaaagggtttgggaatgagtaggaagttattttcctttttttttttgagatggtatctcgttctgtcgcccaggctggagtgcagtggtgcaatctcagctcatggcagcctctgcctcccgggttcaagcgattctcctgcctcagcctccctggtagctgggattacaggtgagtgccaccacatctggctaatttttgtgtttttagtagaaagggggtttcaccatgttgagcaggctggtctcgaactcctgacttcaagtgatctgcccgcctcggcctcccaaagtgctgggattccaggcgtgagccaccgcgcccggccctttcttttctctcactgttactgtctccctgagtttttactcggtgttaacgtttaaaagctccagcttcaaaaagtagtttttagtctttcttaaaatacagatgtaagcacccatcagctctctgcccaaagataaatattcttaacctttaggtgcctatccttttatgccagatgccaagttgaccagggagtgtctgcacagattcccggtgtctgcacctcctagggatatggaaggaggcctgagctccgcgaggctggatgttgaagctgttgatcaacaggtgtgggcaggaagggacgggaggctggaaaccgtgaccatgcccagagacagggcttctgggggtcaccagcaatgcctttcactgccctctccaccacaacctgcttttcgaatttaaagataacagaacctgccaggataggccactcatttttgtttttgtttctgttttttttgttttgttttgttttaatgtgtgtgtgtgtgtgtgtgcgtgtgcgtgtgtgtgtgtgtgtgtgtgcatttttttttttttttttttttttgaggcggagtcttgctctgtcgcccaggctggagtgcagtggtgtgatctcggctcactgcaagctctacctcccgggttcatgccattctcctgcctcagcctcccaagtagctgggactacaggcacctgccactacgcccggctaatttttttgtatttttagtagagacggggtttcaccatgttagccaggatggtctcgatctcctgacctcgtgatccgcctgtctcggcctcccaaagtgctgggattacaggcgtgagccaccgcccggcctatatttttaattttttgagacagtctcgctctgttgcccaggctggagtgcagtggggcgatctcggttcactgcaacctctgccttccgggttcaagcaattttcgtgcctcagcctcccgagtagctgggattacaggcacccaccagcatgcccagctaatttttgcatttttagtagagatggggttttgccatgttggccaggctggtcttgaactcctggactcaggtgatgcatccgcctcagcctcccaaactgttgggactgcaggcgtgagccactgcgcccagccctgttttttaagttatgtaaacagcaacgggaatgaattgactgaacgagggggagtggagtgggaagcaatgtgctgcccgggtcttggtgtgaaacgcagtggccctgggcagaatgcacaacaaaggcgcacggatttgggtttagaggcttaatccctccttctcttggtgtgatgttgactccacagaggcaaatgtgccccaggctgcagtcaactgtttgacctcgagtttgggataagcatacggcctcttcagcctgatgtcactgatgtggtttggatgattttctcctccaaatctcacttcgaaatgtgatccccagtgttggaagcgaggcctagtgcaggtgcttgggtcatgggggtgaatccttcatgaatgtctagcaccatccccttggcgatgagtgaattcttgctctgatagttcatgagaggtctgttttgttttgtttttaattttcctttacacaacagtatacagtattaggtgccaagagacctggttgtttaaaagagcctgcccccacccccaccccccaccacttctctcttgctcctctcttgccatgtgacatgcctgctcccccttcgtcttcccacatgattggaagttctgggaggcccttagcaagagcagatgctgctaccagcttcctgtatagccttcaggaccatgagccaaaataaacctcttttctttataaattacccagcctcaggcattcctttatagcaacgcaagaacagactcacacagtcatacattgaagtggcgctggttcccaggggcccaggcttgcctggacagcgccctgtggccaggaagacctggggagggagggtggctggaggccaggagctgtgctaggtatccctgctctgcagccaaggaggctcctcctccactgccctggccacctggatgctgcatttaattctgggcaccacgcgccagaaggaggagtagatgagccatgttctggggggcagtgagcaggatggtgaaggaggagtagatgagccatgttctggggggcagtgagcaggatggtgaaggaggagtagatgagccatgttctggggggcagtgagcaggatggtgaaggagcttagaaccacgagaggaccccgcttttccagggttttggagggcagggctccaggagaggctcatttagggctgactccgggcttgcggcttgtggcatgagctcttggaggttctccctaaggagtcagccaatcaggccttcctttcttgtggttttgagcagattccaagctggcttcacgggaggggtgttgaacaggagtagctatatcagagtcaaggcagggaggggagacctcagtactgctggatgtcgcacatggagatatgggcgcatcttagttatggtgtcagtcccaaagcctgtatctggccgaggttgcttggggacgtgatggctaaagctgtgcccttgcagggtgagagtgcggggtggctgctcgtctggagaagagagcaccccttgggaaatggaagatggaggtggggatcagctgctgcacagtttccaggaacactggtgtctcagggagacacctggcatctcaaaataaggagaggctgtctgacagcttcagttaaggatgatcggtggctgggacggtggccgggagggctgctgagcttctgaaatgagcgttaggtgaccctgacctgctgaaggcccctgttcacctgaccaggtgagagatggctcggaagtgagggagaggggagagggatgcaggttgtgggcctgtaatccttattgatatcagccaccctcaacctgagatgtaaattggaatcacctgtggctctcaagctggcattcagacgggcagcttttcctgagccctcaaggagattctgtcttgcagcacgtgggtaacaagtggattgggtaaataggctcttccctggagggatggtgttaacgcagagacccgagactgagcttaggaaacaaaagtggaacagaacaacctcctgatttcaaaagcaaaggcttaaaatttatttcagaatgagttacagtgatattagtatgtttttttgggtggggaggacagaatctaattttagttgttttagattatggtactttttcctgcttgatttacatgttaaatgtttctgatgaactgttaaaatcttcgaggtttttgcttcatttaaacaaatgatgcctgccaactctacaacttaaatatgttttccgtgtatatagatatatacttaaatatatctactgtgtgttttggctttgaggttttcaaaaatgtgtattcaaatcgtgtagcgctacagctaattcagtaataaggactaggcttagtggctcctttctgtaatcccagcactttgggaggccaaggtgggaggactgtatgaggccaggagttcaagaccagcccgggcaacatagtgagacccacatctctaaaaacaaaaaatacaaaaattagctgggcatgatggtgagcatctgtagtcccagctgcttgggaggctgaggtaggaggatcacttgagccccggagttcaaggctacagtgagccatgattgtgtcactgaactccagcctgggggacagagcaagcaagaccctgtctcaaaaggaaaaagaagagaaggaaaaaaaatcaatcaaattctaaggtgaatttgagagtatacataagtttaatgaagatttttatttagtaataatcataggtgcacatgtagtaaggatagttttcaagcggtgttaaggaagtggagattgagatgttaaatagcatctgataggcgtttgcttttcaaatagacttagtacttcagcttcttactctagagacagaatacagttcttacatggcttttaagatgctgcccccttctggtgactaggaagattataatatctgtagcaaataggcattctggggttttttttttttcatatttaaatattagttttattactgaacctgaaaaacaaaatgaggatcagaggtagcgtctcctcctctgtactctcctttcttccttgagaggaggaataactttctgtctcttgctgttctttgtaaatgagtttccttttggctttctttcttctgtccttccttcctctgatgggtagagcatctctgtgggccaggtactgtgttcagcatttcatgagatttatcaattttaaagaagaattgacaatatgatgcggagttttccagattgctgtttgttttgagagggagtcttgctctgttacccaggctggtgtgcagtgatgtgatctcggctcgctgcaacctccatcttccgggttcaagcaattctgccttggcgtcccaagtagcagggattacagatgcatgccaccacacccagctaaattttttgtatttttagtagggatggggtctcaccatgttgaccaggctggtcttggactcctggcctcaagtgatccacctgcctcggcctcccagagtgctgggattacaggcgtgagccactgcgcccggcccagattgctgtttttttttttttttttttttttatgatgtaaaagtatcaacatattttttaaagaaagtttcatctgctgctatctagaggaggtagctggaaccagagcaccaggctggcactggcaaggaggagagggcacctcccggcatgtggacggaatgacccaggtgaggcgggtgtggcgccagaggggcctgttgcagacctgaagaactccagtgtgttttgcagaaagggagtttcagagaataaggggcagccttgactcagacggcttgggagaggagtaagtgcagcccagcctccaggggaaggggaggaaaactgaaggtttgtaagggatctggccagcatggtcttgatgcctggaaacagctcctgggcttctcaccagtattgggagctgactcttagaaaggcagccttcctggggagcacaccctcgaggggccggaaaccgtgaaactgaccagaagcacataggtccagtgggcactgaaatacattctcaggaaggaagtgtagctgaagtccagaactcagcttactctcactcctgggcctgctgctgccttaatgtgcctgctcctgtgtttttgttctgataaacacgtatagcactttcaattatgctgttacttacagctaagtaaagcagtactaggtggatttgtcagtgccacttcctacaaagtgaaggctggatttttgggggactcatttccagcagccaccagcaggtggagggagtgagatgcgtaaacaaactgtccctcatgcttggtgtttgggcagatgcattgctaaagcgtgctcactaataaatcccctgctgatatggcacaaatatttatagccgatgattgatgtgaaattaacaaaaactagcagttgacagcgatatgaggtggcaaaggctatttgggaaagtttccgttgtctttgaaaattaagaaaaattatacgtttacttgccttgctaagaactgtttaagaataaatcaacataaactagggcagcttcttaaactatgatggagaagcacaaggtcaaagtgtttcgtctcagaatgaagcagtaatgtattactttgcgtactgtgtacaggggccggcagatgtttctgatgttatgaagctatgctcctggaagtggttgtgaaaatcgcagccctgtgaattgtgtgccctaagagccagctgtgctcctaacagtgatgccgtctttccatggaaatcacccataagcacagccttcagtctaacttcatgtcaagtctaagtggcacagctatccatgaacactgtaaacattcccagctccatctaaggtgattaaacggagtcagaacccggccatggatgtgtattcactgttatttaacagatgctcaaactagacaggtgggactgtccagatgcctgtggggcactacagagttttgaggaaatagagtctcagactggagccccaaggaccttgaggacaggagtctacctggggaggggcatcccagagacttactccagctgcttaactccggtgtgcctggagtcaccttgggaccttgttacctgcagatttggattcagcaaggcaaggtggacctgagagtctgtgtttctggtgagccacaggtagcaccccggctgctggtccctggtctggggaaaggcaggcagagttggagagacccttcccgggttcctggttgcaggtgctgtgtcatcgtatggctgtatttgaggggattgtgtaagaagatgttgttaaatttatttttagaataatagacttttagatagaagagaaacctcggaggtcaatcagctttcactcttcctctcttgtgccccagtcctagtgatgagaaaagcaatgatgtttcccaaggccggggctgtcgactgaattgtgtccctgcaaccccgtgtgatggtattaggaggtgggtctgtgggaggtatcaggtcatgggagtggaccccttgtggtggcacgaatgcccctcaggagcgcttgctctgtaccctatgaggacatcatgaggagatatggcttctgcaggaagaggcctcaccaggaaccaaattgaccagtaccttgaacttggacttccagctgccagaactgtgagaggtaaacgtgtgttgttgaagtgcctctgccggtggtctttgtgatagcagccccagccgactcatcacagccagattaagggagatcaaaagagttaaggttccagactccagctcctgagttcttctatgtggaaagatgccccttcaaccaccaaggccagggatgccctgtggttcagcgttgtcacccttgttgcccgcctccagggcagagctgggggcactggaggtgctcaggacgtgtggagcagaattgggagtgaatgttgtgtgctcagggccacctccactctgcaagcacagctcccagagatgaggacggggcttgctttgtcctctgccacacacagcccttcatgcaaggccttggcccctccagggccacacaccttggccacccagcaagcaccccttgcttggccagtctttccgtcacttcctttcctttttccctgtctcctgagcttcagactagttgaccctaaggggtgtctccagctgtaaataactgtccagactgcttgtaaaggaaaacattgcaaccaccttactgcacaattgatactattattattttagggttacccaaaaatgtgcagcacgccctcgaatgacatggatttgttctaacgttggtgatgaaaaaaatggattcccgctggggccctgtctgtgtggagcgtgcacgcgctcccgtgtttcctgtgtgtggagcgtgcacgcgctcccgtgtttcctttgtgtggagcgtgcacgcgctcccgtgtttcctttgtgtggagcgtgcacgcgctcccgtgtttcctttgtgtggagcgtgcacgcgctcccgtgtttcctttgtgtggagcgtgcacgcgctcccgtgtttcctttgtgtggagcgtgcacgcgctcccgtgtttcctgtgtggagcgtgcacgcgctcccgtttcctttgtgtggagcgtgcacgcgctcccgtgtttcctgtgtggagcgtgcacgcgctcccgtgtttcctttgtgtggagcgtgcacgcgctcccgtgtttcctttgggtggagcgtgcacgcgctcccgtgtttcctttgtgtggagcgtgcacgccctcccatgtttcctttgggtcttccggtttccgtcgacgtcccaaagctgtgcacattaggtgactggcgtgtctacagcatcccagtctgagtgagtttgggcatgtgtgagtggccccgcgatggaacagcgccctggttcctgcctgcccccactgagctgctgggacaggctcccaccaccctgaactggaataattgggtaaataattatcttacttatttttacatgtatgtaagctcacgtttattgcagtgtttaatattagaagggctttggtctttatttagaagtttggtgatgtttttgtgaccagaaataagccataggagcttaactcttgtttatatcaaattaccctatgggaaacttggttgcattgtatgtcgtttcgtttaaagttgctgtttccaggaacctattggtgatgtgaagtgaggacttactggatgacgtgaaactaattttaactttcttttactcatcatcctgggattattcaagtataaactcagaattgccaaattaaatgcaaagatatgaaaaggagccgcttatgctaaatgtacagatgatgcgtttttgctgtaacggagtcgtccctccgggtgctgactgtgccactcagcatggtggcccagggctgtgtgtttggtgcacagtgggacgtcttagtcccactacctcagccagactcctggcaaagtctttattttttaagataatttatttttagattttattcaaaatgaaaacccatttaaaaagcacatgagaaatgagttctttattcactcatctaaatatttagggctgtggatgggctcagctgctttaaatatttggctgggcagatgagtgggagcctgtcttcctcttgttgacatttgcgtctgtggtggtgtacacagatgagctcactgctgtcctcggagcaggtaggaatgtatttatttactcgcatgccttcagatgcttgcagtaagtccatttgagatgctgcttctatttttccttgtggagaacttacttgacgccaacaaagaaatttctagctgcttgtagaagacaccccagggtacgcagccagtcccttccacgaatgctgcgagaacccacacagctgttcatttcggtggccgagggcctgtgggctgcagtacgtttacactgtgtgttgggggggtggcagtgtgctttcttcctgccccaattttgcccaggaggagtctggtgatggagaaggtgtggcgggcagcaaggaggctggggaagtggatgctgcagggtgagctctgggcgacccaggaggaagtatttgcatgaattagccacacgcagagggcagttatgtgtgatgtgggaaatgactgcaaagctatcttactctttattccatagccacaaaaataagtttataaaaagcccccaccaagtcaggatttgtccagaatggtcactctgctttggagaactgcggatcccctgccatggcccatgtggctccggaagttcctgggagtggctcgtagagcctgttttcatccttcagaggaatcctgcagtccacttgcccagcgtcacttcctccagtgccctttctgggtcccacgtgattctacctgatcgctggctctctagggcttttcccctccaggttcagagagagcgcctgccccagggctgggaagatgagcagggatcctgggatgtgatggcacggtcagtcgcccctggtggaggcaatgctggtacccacgacgtggagccctgaaggatgaggaaaataatttctgagaaactgactcagggaagtgcctgtgttcagggcggaggttccactgtgatttgaaaacaggcgattcttccagacaactttaaagatgagtaggtgcaaactgcagccacagtaaacttcagggtgtcaacttcaggggaatataaacagcctccagggagcccctctctccatcccagcctttcttcctctctcgtaactgttatttactcagtaattacaggttcaagtcccttgtccaaaatccaaaaagccgacactggaaatattctgtagctcatctggcagcagggccagagctgatgatctaattcggatgatttatggcctctgtttaccccacagacgatcagtgtgcctgcttccagggggctgctcctaagggaggtgctggcactaccttttcagcctgcatggactgtgctggaaacactcagtagcaactcaggctcagggagccctcacctgaagccctcctcttacccaccctctgccctatagacccccatactcctgtagataccccctcattacagacccccaccatccccgctggattagggttctctagagggatggaaccaataggccagatatgtaataaaggggagtttattaaggagtattaactcacaggatcacaaggtcccacaataggctggctgcaagctgaggagcaaggaagccagtcccaggccgaaagctgaagaacttggagcctgatgttcgagggcaggaagcatccagcacaggacaaagatacaggctgggaggctaagccagtcttgcctgttcatgtttttctgcctgctttatatttgctggcagctgattaaatgatgcccacccagattgagggtgggtctgccttccccagcccgttgactcaaatgttaatctcctttggcagcgccctcacagacacacccaggatcaatactttgcatctttcaatccagtcaggttgacactcagtattaaccagcatacccaccattgtttcacctgcagcctcccccatctcagctggtgctcactttatttttactgcttgttgttctggccccagatctcagagtcctggtaacgcctctcctcttctcactgccttcagtatccagccaagctgggaaacgccactgccacagtacctgcagggtccagccagctccccacctccactggatgccactgtgttagcttgggctgccacgacagagaccacagagtgggtggcttaacagaagtgtatttgctcagtttgtagaagttgaaagtccaaggtcaaggtggcgtttctggtggggcccctctttctggcttgcagatagttcctccttactgtgtcctctctgtgcttgggggtggggagagaggcgagaagggaaggagaaagagatggagacaggtttgctgtctcttcctcttgttataagaacaccagttgtattagtctgttgtcgtgctgctaataagcacatacctgagactgggtaatttataaaggaaagaagtttaacggactcacagttctacatggctggggaggcctcacagtcatggcggaaggtgaatgaggagcaaagttacatctaacatgggggcaggcaagagagcttgctcaggcgaactcccgtttataaaaccatcagatcttgtgagacttattttctaccacagaacagaataggggaacccacccccaagattcagtaacctcccactgggtccctgggagccacaattcaagatgagatttgggtggggacacagccaaaccatatcaccagtccgtggagccaggtgtggtggctcacacttgtaatctcagtgctgaggcgggaggatcactggaggccaggagtttaagaccagcctgggcaacctcttttaaagttaattacttcccagcaggccctgtttttctggtacagtcacactggaggttcaacacaatccagccaccacatcacccaggtcactgcagtaacctcttagcgggcctccgtgccccatcccaaaaggtccattctcaaaggagactccagggtgacccctaaaacccaagtccaatcacattactcctgggcctcacacctgcagcagctctccaaaattctcaggataaacaccgatgtccttactatgacctccagggccgcagagcaggcactggcaaactgctgccacctgcttctgtatggctttctagctcagcacagtttctgtggttttaagtagttgggggaaaaaatcaaaagcataacttgtggtgcatgacaatgatatgaaattcatatttcagcgagcacaaataaagccgtgttgggtcatagccatgcctgtttgctcaaatgttatctgtggctgctttcatgtgacatcagcagaattcactggttgtgacagagatctacataattccctcgattttgtctcttggcccacaaaacctaaactatctactccctggcccgtggcagtggaactttgttaacccctgcttggccttctttcctcactacctctttgcccgccaggctcaccctcactccctccgctccagccacactcagtccctgctgttcctctagcacgccagccccagggcctttgcattagccgtgccctctgcctgagtgcccttccgcttcctgcattttgcccttccttcaagcctttgctcagtgtggccatcccattcagcctaatggtgcatgtttcctccacctccacagttcctcttatcctgtttccattttccttagcagttatccgcatcagacacatttctttttcttttttttgagaaggaatctcgctgtgtcacccaggctggagtgcagtggtgcgatcttggctcactgcaacctccgcctcctgggttcaaatgattcttgtgcctcagcctcccgaacagctgggattacaagcacttgccaccacgcctggctaatttttgtatttttagtagagaaggggttttaccatattggtcaggcaggtcttgaactcctgacctcaggtgatcctcctgcatcggcctcccaaagtgctgggattgcaggcgtgagccaccgtgcctggcccatcggacacacttcttactgatatggtttggctgtgtccccacccaaatctcatcttgaattatagctcccataattcccacgtgttgtgggagggacccagtgggggataattgaatcatgagggtggtttcccccatactgttctgatggtagtgaataagcctcctgagagctggtggtttcataaggggaaaccccttttgctcggctctcgtctctctcttgcctgccgccatgtaagatgtgcctttcaccttctgccatgattgtgaggcctccccagccacttggaactgtgagtccattaaacctctttttgtttataaattacccagcctagggtatgcctttatcagcagcatgaaaaacgaactaaggcacctactgtatttgttttcttgtctgtgcaccactgcggaactgtgagctcccagagtgcacagatatgtgccagacaccaagatcagaatgggtgcttcgcagtgctcaatacattatttattgaatgacttaatgtagaatgactagttacacagttcaggtgctaggaggcagtataaaagtcagagagcaaatgctttaagaaactgtagtatacaccaggaaatgcaattctttagttagataccttctcctttcagtaaaattatgttcagtgctgtaaataggcaactttcagtgatttgtttttcaaacaagtggctttttatcttttcctcttgacagtgagtgtctctccatgtgtgaagtattttctcctctcatatctgtgaagtcctgcttgtaagtgtttcggttatgcaacatttcatggggaatttgagcactggaattcttggtcgctagttaggtgggtcttaccgcatttgtcagaaaggaatgcgtccatcaggttggttgacgggttggttgacggtctgcaagttgcagtcttggcacaggcacccatcaaaatgacacacggtgactctggtttcttccagcatccccgagatgaagatgaaaaactgttgcatagcaggtggatcttgctagaagctctccagccatgtgattagtttatttgctcattttttttttccttttaatataaatatatcagaattcaggctggtttcagaacctggcatcaggaatggaatttaaaaaaaaaattggttcagatgtatcattcctccaattggcatatataaaaagaatagtgtggctcttgcctggtaatactggcactttgggaagccaaggtgggaagattgctttactccagggatttgagaccaggctgggcagcatagtgagaccccgcctatacaacagattttttttaattagctgaacatggtggtgtgcacctgtagtgccagctactcgggaagctgaggcaggaagatcctttgagcccgggaggttgaggctgtagaaaaccacgattgtgccagtgcacttcagcctgggcaacagagcgagaccctgtatcaaaataaaaaaaaaaaaagtgcttgttactgtcctctttatgccagttcctttaggttgcacattcgtgtttcttttttatttttattatcttttttttttttttttttttttttttttgagatggagtctcgctctgttgcccaggctggagtgcagtggcacgatcttggctcactgcaagctccacctcccaggttcacgccattctcctgcctcagcctcctgagtagctgggactacaggcgcccgctaccacgcctggctaattttttgtatttttagtagagatggggtttcaccatgttagccaggatggtctcgatctcctgacctcgtgatctgcccgcctcttcctcccaaagtgctgggattacaggcgtgagccatcgcgcccagcctattaccatttttttttgagacggagtctctctctgtcccccgggctggagggcagtggcgcgatcctggctcactgcaacttctgtctcccaggtttaagcgattctcgtgcctcagcctcccaagtagctggccacaggcgtgcatcaccatgcctggctaatttttgtatttttagtagagatgggtttcaccatgttggccaggctggtctcaaactcctgacctcaagcgatccgcctgcctctgcctccgaaagtgctgggactacaggcatgagccactgtgcccagcctcatgtttcttttgacagataacatttaatagtaataaataagtggtaataagtaataaataataattgagtgcttttcacattccaggtgctgagctgttttgcatttcacgcccctcatcttcatttatattgttgttcttaattatccccattttaccgatgaggaaagggagattgtaaccaccccgaggctgcacagctaatacccagagagcagaatttcgccacatgcgaagattctagctaatcctaaaatctgtttttcaccagacgacgccggcccttccggcttgtcgtgcagcacggcattatctggtacccaccatttgtatcccggcatcatttatcttctccctaccttgttgccaaggcacgtgtgggtccctaacggctggaaacaccaattattcaagacaccctaagggagaccagaaggaaagcgatatttaagaaatgcaggcacagaaaaatttaagcattttagactcattctccatcagaaacagggaggtctttgaagaggctgcttttgtaaaaattgccagctgtacccggtcagcacatttttgttgtctaacatttgttctcaaccagcaattagtcaatgactctagaatttcagcgcagatccgatgagtatagaggacgcggtgtacgccctgtgttgccatggcaacgcaggcatgcacatcctcctcccttggctgcagtgtggtggtgaacagcactccggttgcttaagtgctgtctgcagacacaaagatgtgtttgcctggtgaaattacagagcttttctttctactttttaagaattttctacactttctccaataagtatgtgttttataaggaaaacaacaaaacaagcaaacatgtttataggtctgcagagaagaagagttcttgtaaacagtgttgaatattcatggttcccaagatcggccatttccccggcctttcaccggtgagaagtaaggcatctgctctggccagtggcttgcgttccattggtcacccttggcattgcttcacatatgtttgcggctgcccttttttaaccccttggtgaatgtgatgtaggaggcagaagaaaggccttctgttctccacaacagcagaccgctgagagccgatcatgtatctgtttttaaggaaagcaaaacctgtttgccagagatgaacatccttcaccctggagccagcatctggtagatttgggggtttggggatggcaggaatgagttactcgattcagagaccaagaactacttctgtgaaagcatcatctgggtttatgtttggaatgtctagtatcacatccataatgaacctttttttaaaaaagtgggcatcagaatgaatcttgcatgtcaccaaatcgaaagccaatcctgagtcatagaagcattgactggtgccagaacttcaaagaaagaaggaacactgcttaccttaaattttaattgtttacagttgtttgcaaaccttttggcttggtggctcacgcctttaatcccagcactttgggaggctgagacgggcagatcacctgagggtcaggggatcgagaccagtgtggccaacatggtgaaaccccgtctctactaaaatacaaaaaattagcctggcatggtggcgcacgcctgcagtcccagctactgaggaggctgaggcagggggatcgcttgaggcggaggctgcagtgagctgagatcacgccactgcactccagcctgatgacagagcaaagcaagactgcctcttgaaaaaaaaaaaaaaaaaaaaaaagcactgcttaccttaaattataattgtttacgaacctgtttcacacatattatctcatctggcccatgagactggcaggtgagaaaaatgggtattaaattattgtttacatcccactgacaaaaataaacagggtcagctgggtaagggacgtttcccggattcgttaaggggcagaagtgggaccacggtgagttcgtttgtttccaaatccagagcccccccttccctgcccagacccagggctgcccctagaccatgcaggggaatgctaggtgggaaataggacattttgttgaagcccgatgcatgatttagcccaccagtacttgggttctaatattccattgtgtgctaaaaacaatgtacttggatcaaactttaccttatattcatgcaatctcacagttatgtggaaatctagctattatacagaattattagtctacctttagggctccccacagcaacaagcaaactcacagagcccagggcaggaggagctgttctgacttcaggcggccttgccaggagcccgttggcctgggtggagcccgttggcctgggtgtccactgtcagaggatggagattgatctggggttacctttttcagcctttgctttgtttgtcacctgaaggggctggatcctgagccctgtaaggcccccttcggctggtgcacacaagaggacagctttgagcctccaccaaggtctctggattccactttaagtgcgggcttgggtgtgggaagctgcaggccagcctcgagggcagcctcctggaggtggaagggcagcggggcgcgagactgctgcgctggtgggatgcttggattcccaggccccaagtcactatcggggaacgttctttgaggtttaatagtattttaggattttttaaaggatagataatatctagatgttgtgttctaccaaaacaaatattgttcttttggaaatatgttagaccaaaaaaatgcatctagatcttcgagttttgacttggaagtgcctcaagtgagcgagtgcctgctgtctcagacatgaggtggatgctgaagagattacccctgacttcatagtctgcctgtctcagagcgtgggcgggttggcatcgtctgcacgttgaccgggtcgtttttagctttgcccacttttcatttttggcttcacagagtgatgcctctggagcatccccttgcggagcctcagcatctcttctctgcttggcccacgtctagcagttcttcttcatcttgcagggaaagtgtgttggcaaacatgctggatactgtcagaatcagagcaggctggatccatggccgtattctgtaaaattccattgtgtctttttttcccccaagtaatctggctctgggaggaaactcgctgattggagactagctgagagggcttggctgggattctgtgggatggggccttcaggaggtggagccgccccaggccatggagacctggagatgctcagggaagggggtggtcaggccctgggtcccatgttggcagcctccctggcccagcgttgggctgggaccctctgcctctcccagtgagaccaaccctgccctctggacggatggaaggacactggggagccgatgatgcccagagtgtctgggggacgcatccagggtcccaggcccagaaaacagtggagccaagagaggaacgaggtctctggattccggacgccctgctgctacttggcctccaaccaaaaaattgttcttctccttccttttttagtaggggagagaggagcaattttccatggaatatatctgatggcaggtcttgaggtcagtctgtcagaggcctgggagatcaggggacaagggtgaaattcgaatagattgtacgaaggtttgagagctggcatgacccacttttgaccgtaaaacctttcagcttgttcttgacttcccccccatccctaatacccccaactatgcaaatgatagtactaggaataatagtagtagaagtagtaataataattacagaagagcaaatttaagaagctaaggagggaggaaggaggcagtggtaagttctgcatagaaatgatttttgcacagagctttgtcattgggaaggatgcttatcacagggggctgatgaatttgtttccttcttgccttatttttggcagttttctttcttgatggtggggagggtttgtgaccaggtcctagtgaggcagctttctgagcactttttcttgatcactgatgatgaccgtaaacaagctgtgggaacataaggaaaagcagatgtggccactggtgcttggaagagaacacaatgaaattgagtccctagcaggagaagtccctgttaaaatggccagaggacatggggacatggggcagggagagcttcagaatgagcgggaagcctccacaacaggtggagaaaatagcaagggctgctgggcacgatcattcgagattccaagaggtaagaactgggggctgggctgtggaagaagtgcgagagggagtggggaaggcaggctgggcgtgctgtggttataggcagcctacatgtcttgagttttcagtagagaaggcctgctcctcactttgaccccggacctgcatgcgcgctgaggatggcagaggggctcctgcctgtctcagtgctctggggtcccgtgctgagggagcatccttatggtaaacgtccctggttctgtaccggaggaacaggagctctggaggtcttctgtttgctgttgtatgctgtggctcagaagttatgtggccactttcactcccaactcacaggccagaaagtgtagtgggaggctgtgggcatatttggcgcttggcaggattgaaggcgcaactcttggcttcgtgtttcagaggttggtaaatggagtcttgctcgccaggtgcatgaggtgaagtcactgggctgggtgcagggagtgagtggccaaccacctgagaatacctggtgtttccttcctcagggacggtttggcactgggcaacagctccatttagctagggtaggataatggtaaagttgccagcagcaatgcttttcctgcatttgccccaactctgtgcagggccagcacttttagctcctagtcacagatatggtgacaggcttgtctccaccattggagtaagctccagcccagctcctggcttctgatctgtgttgactgctacccgatagagccacagtcatcctgtgtgcctgcttgagtctgcaccgaacatggctctagcttcttcgttggccagacaggatctgctgtatccttatgatacctcgtcatcttggagtccaccgtgcacttgtccgcttgggctgccataacaaaataccagacgctgggtgccttaaaccacagaaatgcattttctcacagttctagaggctggaagtccaagatcagggtgctggcatggttggactctggagagactcttgtcctgacttctagatgtctgccttcttgctatcctcacgtggtgcagagcatgccagctctctgctgtctctttttctaagggtgctaattccatcatgagggccccatccttatgaccttgtccaaccctaattaccttccaaagatcccacctcagataccatcgcattgggggttgagctttaaatacaaatttcaggagagctcaatacagcccatagcacagcgcttccgcacacatccacattgcagacccgccatcctcaaacgcactgtgctcccgtgagctccctgccctggagtggaaaccctgggctggggaggaggtgcgctaagactgggccacaggtgtgctctggttcagaaaactcttgcaggtcctacttcctgccttgacaccaccccctgcccacagccttctcattcttgtcctgtagcccagtttcgtttcacctgtcctctgcctgtaatccttttcagcccctctgaagagcggcccagtaggatggttgactgacgttagcttggctttcttcctaaggcaccgtcttcctcattgaaactgtgcccatgacctccggaagcctgccagccgcctgcctgcaaccccatagccgagtcagctccctggatgggctagtgtgttgaccttccactgccccgaggggaggactctgccctactggatcctccacctctcacttcattttgccagttgaaatgttcccctgcctagtgtagggactgccacttcatgctgtcttgccagagcaccttcccaggcagctgcaaaggtggtcttggtttgactcccttgtggcccacacaacactttcgttggagatgaagagtctccctttcagactgcaagccccttgaggtcaggatgctgcaacgaatataatagaaaatgatgttaatattcaaggtcatggccatcctcaatgcagccttcatattttcataatgaatagttattgtgaaggagctgatttttggaggagtggtttgtctgcagttgcacacatctgtgataacatggggtgggtggttctgattcctgttttgaggtggtgatttatgatgcctgtgtacttccctgtggtgcccaggcctgcagattacagacgctgtgtaattagagaatccctctccacatgtgttctctgaacagggagcccagggaggcttggatctttagattgataagcaggatagtaaaccagttgtgaggaacattgtatagagaaaaaacaaccttgagtttctgttgaaatctagatttggtataactgtcttcatttctttaaagagcattcatcaatgatattaatgattttcatttcctacctttgtagttttcatataaattagatttacataggagacaaagaaatccttccctccctgttccagttgtggaacatatggtcaccgttctgtgactgggagcattgctgtttggcatgcttgtgggcacggtttaagggttgagaccacatcctaggtggcggtcacaaacccggcccagcggcctccctgctaggcagtcctccatcaatactgatgttaataattatgtaaaatcattcctgtccgcagcctagagtctcactggagaacaatcagacatgctttattttctacttgtaatcgtaatctgagtgcaatttcaggactttgttttccagatggcttattgtttcacacgttttcttttctcagtgaagcccaggtaacctgctgcttgggtgtacgctgggcgggttcgcagtgctggaagagagagtggacagattttacaccagcacctttcatctcaggggtgcttgtgaattgattgcacccctcctgtggcgtggaggcggtgcctggttaaagtggggctcagatgccccttggttgcatttaatgtgtgtgcataatcagagggcaaggacagcagtaaataatttatgtcagctggagcccttggccctggtaatgagatctcaggggcagcgcctagagtgctgggcccttccagatgatctatgaattggtctttgcctttgtacttattcaaactgacaaatacttacttaatagctgattgtattcaggtgctaagggaaaagaacgtgactgtgtgggggtctccctgactccttagaacctgcaaatgcatgaaactcatgttaagaacagttgtggttcacgtgtaccaaacttgggaaatcctgaccagcgcatccagggttgcttgggcacagtggtccttttgcatggggtggccggccaggtgtgctgagtgccacctgggcttgcatgccggacgcatacctggcacctgcttccaggttggcctgccagccgatgttgtgatcttgtggagggaatgaccccacgtctctggattctggcttctgcttccagtgagactccgcccaggttatgtttgtggccttttatctctccaatgtgaggcatctctgatgatgcctaaggatgtccttctaatttggagttaacctctctttcccaggtgaggttagcaaatacgtatagattgtaacaagagaattttgcatttcagttttgttttttttttttttttgagatggagctcacgctgtcgcccaggctggatagagtgcagtggtacgatctcggctcagtgtaacctctgcctcctgagtagctgggattacaggcaggcaccaccatgcccagctaatttttgtatttttagtagagactggatttcgccattttggccaggctggtcttgaactcctggcctcaagtcatctgcctgcctcggcttccaaaagtgctgggattacaggcctgtgccactgcacccggccacatttaatattatttacctgagatttttgaggcaagcagccctggggatgtaagcaccttttaatttggcagcttatttgataagcaaatgggttctatcttaaaatccaaagttgtttacacttaatgcatattttgagagctgttacccaaacctttttccttccttcaatgagaagacttatatctttttgagcagaaactgtggattcagaaaccaacagaactcttcattctccttaaggagatagaggccagggaaagtgtttttaggtaaataataacgccttcttgcctctctccctttatctccccattctccctgaaaaaactacaagaaatggtaaggaagagaataaaagaggaaaataaatcacagataactagaaccactttattgctattattccaggtgatctactgataaattaaaagaaagatgaatataagctggtaattactttaaaatattcctttgtgaatgtgcctaattggcgcgggcctccctgtagaatgaggctcctcctgcagttcgaggagaggctgtaattaacagtgaattagcatatagtggcgccgtgtggcccgcagggtggccttgtccatctgctgtgtaggggacttaggtgacacctggctagtggtagtctgcaagaaccctttgttaatgggaatattgtgcatgagtcagaattcagaatctttggtatggttttttttttttcccccttttgtgtgttttggccaaatactcaaaagcactaagttttcttgcgtggtatctgttcatatattgattcaccaaatattgattgtacatctgcgaatgtgctagataccctactggtgctggtgagcagaaacaggcaaggtctttggcctcagggggtccttggagtctagaagggatggtgacattggccagagtcaccccataatcatacagttagcagtgtggccagcgtcacttaaagcggggaggtggctggtgctggagcgtgtataacaaaagtgggatccggaaagggctgctggcgagtgggagttttctagggagccgctgctcttgcttcaggtctcagatggcataggagtgtgtgtcatcccagaggagcagcagcaaacggcctgtgatgggctggatgtatttggggagggaagaaggcagttgtagctcaagggagagaaaaggcaaggagaaacatggcgaggggtgggggctttgctctttagcccgtgagcagtggaaagtcattgaatgctgtctggtgtaaaatctgttagcagtttcacttccatctggagcacccaggcctgcaggagtgtgggttggctctctacccccgttgcagattggcttgtggtttggggtgtgccaggctcaggggcagggccctttttccacacgcttagggaagatacgagactggctaactcagtattcaccgtgaattcttttgtgggaaatagaacacagcgttgggtaccaagagggtgctgtcttttcctgttttcttggcctcctagggaatcagtttgattctgtggctattaaattaatggtttagctgagatgttttctctactcagggcccaatgccgtatgtgatattttacaacaaatttggttcactggggccgacttgaaaatagtcaaagtccaagtaaacttctgcctgtgtgtggtgcgctcaaataaaggaggctgttcaaggtgagtggttttcctggcggtgtggttttttaaaatttctaataaaatgcaaatgattacagccccttccatgaagagtgcaagtacgcctgactcctccgcgcagggaatgagcagcctctgctccttcatttgattgctatgacaacccacagaggtgggtgttgtcacttccactgccagccagcttgcacggtccagggacgtccccaccctcggttgggttgtccagggtcacatggttgggagtcagaaccagacttcaaagggcatgtgactacagcatccatcctccctgctctgcctcgcactgccttctaatgggtcccactgaggagcttgccagtattgttacaattggagtgatctcatatgaccaaaagttggaatgatcccattctttactcacagcctgagctattttttttcaaagcattatctctctactgtttgtaggcagagaatttattaaatcttgcctaaatttatccgtaagcatggatcaaatgcacatttggcatgattctcatctctgagccattgcaacctattttttaatgccaagagaaagtattttaaggaagtggggtcagctttcctctgctcccctgacttcacaggatagctatgcattttgcctcttggggagctgggttattgtgaaactaggtcaaattattgttttttctctttatgctcatagccattccaaagacagaatcctttcctcaaaaaatgaatttttgagtgttcctatattcttggggatgaacttcaagggcagaaaataaatgaaaggggattactttgacagcatctgaacaacagaacaccttctgaacagcacaaacacttgtagcaaaattaaaagaccaacaaaaatatgtattacatatagagcattgtcttctatatgtaaagagttcttataaaacaataagaaaaatatttcctaactaaaggaaatggacacaaaattcataaaagaagaaacaaaggagcaattaagatataaatatatttggctttgttgattaaagagtaacaattaaaatgacaggtgacttctgggccggatgcagtggctcaagcctgtaatcctagcactttgggaggtagaggcaggcatatcacaaggtgaagagatcaagaccatcctggccaacatggtgaaaccctatctctactaaaaatacagaaattagctgggtgtggtgacgtgcacctgtagtcccagctactggggaggctgaggcaggagaatcacttgaacccaggaggcggaggttgcagtgagccaagagtgcgccactctactccagcctggtgacagagtgagactccatctcaaaaaaaaaaaaaaggtgacctctttcttttcatctggttaagttcagtgttaaaaacaaaggcccagtgttggtgaaggtgatggaaaatagttccccttttacattttagtgggaaaaatgtaaattgagatagccatctggagagaaatttgtcaaacagtaataaaaaccctaacaatgtatttgacctctgacctggcaatttcatttctgcctatcttcttttaaccctagattgattaaactcgttaaataaaacacatttgtgggtatagaaaacttcataggtttctggcttcctgccccacctgtggtttcattctgcccagttgtgttcaacttgaaaacgcttggtgcctagcacagagtagacccttaataaatgtttctgtcctgaacagatttaaaaacaaatagtgaaaacaaaattctgaacgtatgattttaaaaatcattttgtagcctaacacttaggaaacgtacttttttgttgcttcgctgaagtgaggaggggtgtatcttgtaatttttaaatgccattattaacttccctagggatgcttgtaaaatgaacaaacgtgcatctttaaattttttttattttttttttttaagcttggaaagagttgaaaagtcaaagtcacatcagctctctagggattgggctgggctcacattttatgaatttgctgtaaagaagggaaacatttgctttcacttttggcatgctgaagtggctttaccagggaattgtgactttaattttaagaattaatcgtaatgtagggggaaaaatgttcttaaaacacaaaacaaacatgtgtgaatagatgaggaacagcagttaaaataataactttcaaaaactaggttaaaatgtccagagaattagattttgttaatgttcaaagcacagctaagttactttttctacaaacaattcttgaaaacgtttttgatttttaagaggaaattagaatagtggttgaaatcatgaggccccaaatcagcagtgtgcttgctgttaattttgttgttgtaaagaacatttgtttttggccaggtgcggtggctcacacctgtaatccgagcactttgggaggccaaggtgggtggatcacctgaggtcaggagttccagactagcctggccaacatggtgaaactctgtctctactaaaaatacaaaaattagccaagtatgttggtgggcacctgtaatcccagctactcaggaggccgaggcaggagaatcgcttgaacctgggaggcggaggttgcagtgagccgagatcccgccactgcactccagccttggcgacagactgagattccatctcaaacaaacaaaagaacatttgtttttgagttataatctctgtttctgcggcctggctaatagtttggatagaaacatgtcttgcatacatgagtatttgttttttgtttttaaaaacactccaaattcagatttcttttattaagtaagtggatgcagtgcatagttttgggatatgcatgcatgcacttttgaatttaaatacatactaagatggcagttgggggacctgagtctcccttgtggtgctgtgggtttgtaggggccggcgagttaactgaactgagttgagtagctcacatctcgtggagcatcaaccaagaggatgcaacttgtgtaactgtgagaagctcagacttggaagatctgcgtctgtatgtgatcgcacacattttggagggtgggatgtgctcggtcttgggcgcgtgcagtttttgctcccttttactgttactgcgttgatgatgtgtaacccatgatatccatgagttactgtgatttctttgtttattttgactcagagctccaaatacatgggatgctagcaatttctgtgttatcattactaaaccacaagagctggaaaattccagtaggtttttgtaggtgatttttcgggagcagttggttttccttggccttcatcctactctacagagtgaatgtgactaggttctgttgtcatggggcacctggtctatcttgcaagttgaagcccctatctgtccagtttaattgacctcctgcaggtctggtctttcttagtttttttctaaccttcactttctggtagacccatttcacattagtgcaaaaattttcagtctcaattcaggcataaagcttcaagttaaggatttatagatgaaaaggctttagttattttatctttttattaaggtccatttttaagcttatatttaaataatgtaccataaaagcttaaaattacaagacttaaaattttaatagtggctgttaataattattattactgagctcttgttatgtggtatgtataatcttatttaaccctcaaaacaaaagcagaaatcaaaacctgggtgggtagatgtggtagacgtaataacggcccccaaagatgtcccaagtcctaatccctgaaacctgtgaatgtgtgaccttctgttggcaaaagaaattaagttaaggaccttgcgttgggagattattctgggctatctgggtggatctgtcataatcacaggggtctctataaaaggaggcagtaagaatgatcttttgggtcagagtcacagaaggagatgtgaatatgaaagcagaggctggagtgatggagccatgagccaaggaatgggggagagcgctaggagccggaaaaggcaaggaaatggactctaccccagaacctccaggatcacagccctaagtcaccttgattttagcccatgtcgattttagaccttggatgtaaggtaagaaatgtgtgttgtgtcaagcaagccaccaagtttgtggtttgttacagtggtaatagggaactcacgcagtaaggacagggcgatccccactttaccatgaaggaaaccaacactcagagaagttgaatgatttgcccgagttcacatcatgaagtgggggagctgggattcaaacctggggctgaagtgggggagctgggattcaatcctggggctgaagtgggggagctgggattcaatcctggggctgaagtaggggagctgggattcaatcctggggctgaagtgggggagctgggattcaaacctggggctgaagtaggggagctgggattcaatcctggggctgaagtgggggagctgggattcaaacctggggctgaagtgggggagctggtcaatcctggggctgctggagcctaggatctagagtgcagtctctggcctggaggagagaagaggctccctgcagatgcagctcttttccccatgtccacccctttaatttcatgagcatcctgggctggctgcactagaaggggacaagattgccaagaggcggccagctgctggagatcagcaacaccagcttcggcgcccgaattgctgcacattgtcccagcagctcaagtgtctacctcctctgatagcacaggtgtctgggcaattctgcattgcaacaagggccctgttctacttttttctgcaaggtttgtccagagtgcgcagccagactatatgctgggcttggttttcctgagccttggccactgctggcgccccgatcccgggccagttgttcttggtggcatggctgtcccaaggagacacatgttactgtctctgtagctgcctgtgcctccaggtgtggtgctgccttcctgggcctctgcagcacctgccctcggcccccagggaccttctttgtcacagctgaagccctcgcatgctggagacttgtcattcttctcctgccgggcatggatgctgacaatagaactactttccagaaatcagcaaatgctgggctgtgccttcaaagtatatccaggatgcagtggcttcctgagccacctcagccattagcaccctggtcccgggcagcagcgttgcttggcggattactgctcacctcttcaagccgatgctgctactctcctggacagtccacttgcccagcagccaggggcatccctgagaagccgggtcagagtgtgatgccctctgccaaaacctcctcctggccctcgccttctgccactctccccttgctcatggctctgctgatccttcaaccaaatgcatgctcctgacccttacatgtctgcactgcttcctctttttggaaaaccttcctgggggcccttgcagcttggccctcgcatccttcagcctcacctccagtgtcattgaggaccctccgtggcacctggccttcctcccagccacagcccctcctcctcacctcctcacctgcttcctatttccccataaaccccagctccctgacatgtctggtgtctctctctccccactggatggaatataagggcttgtgtttgccgtttccccagcacctagacaggacctagccaatgctaggccctttgtcgatgttcgttaggcatgcaggtgaacaagtgaatgagtgatcctgagtttgctctggtttccttctagttgtgggaagtaattcctgaattgcagccctacagcttttattggtgacaagttcttgactccccatcacctctgatggagggggctggggtctgttgtgagttcaggagccagggggctgcatctgcgtgttggctctgctgctgaagtggctggatggccttggagatctagttaatttttttcctttttttggagacccagtctcgctcttgtctcccaggctggagtacaatggcacaatcttggctcactgcaaactccacctcctaggttcaagcaattctcctgccttggcctccggaggagctgagactacaggcgcccgccaccacacccggctattttttgtatttttagtacagatagggattcaccgtgttggccagggtggtcttgaactcctgacctctggtgatccgcccacctcggcctcccaaagtgctaggattacaggtgtgagccaccacgcccagccgatctatttaatttcattgtgccttggtttcttcatatgtttcaataaaatgggtatgttaacagtctctacctcccagagtggttggggttacgtgaagtaagcttagacacggccgaatgagccagagcctctgctgctgccattggcgttggcaccattcttacctcctatacctacgaggctgtcatgtgaatgtgtcaagggccctgtcacgtctctgagccggcttctctgggcactggctgggctgaccccaatggcccctgcccatcatgcatttaggggctcctctgactccagatgtcagtgacccttctggtctctccaacacaagggttggtcattccctgtgcccattgttcatgcattggaacttggagtgcctgctctctgccctgggtttatgtcctaaggatttgaagatagaagaggcacagcagtcacttgggagctattcccagtctaacaggagagggcacatggcagtaaccccctgggagcggctgctgatgttctggctctctgcagttgggtaggagtggaggaggggtgcgatcggaagggagtgccgcgcagacccccccaccccctcagaacagcggccactgtgtggatgtttctgacggcctcttacagactctgtcctttttgttgtagctgatggagcagaattttaaatgcattcctctaactagtggtcagcttgctactgtccaacctaagctcatattcaacactttagaatgccttaatcttttcttgttgtgttttgaataggttacatgcagacatccaaaataaacttttttttttctgtacaaaattagatttagctaaagtagcttaggttttataaaagctgatgttcttcatgctcttcccaattttgggaaaggagccttcgtctttgcttcctaggaatggtcatagtcacaccagccctcctgctggctttgtagaatgctcacagtggaatagactgtcagcaggtcctgagatgtgactctggacagccagtggtctgtagcattctcatccttcagagctccctgagcttcttcacggccacgctgctctcctgcatgtccgcccatctcactggggtgatgaatggatctagacctggtgcctggactcaatctgcagagacaggtgtctgggatctgaagacagcagttggggaggacagtgttggctgctgctgtgcttcctttaactgaaccccggtggcccagttgctcctcttggtggactcactaagtcaactttgacgcttcagccaacgtcggttttgagaatgcgacctatgaaattgggagccctggctggatcagaagcacatggttcagtggacactgtcagaggtgctgtggatcacttggaccacggtagctaatgtttgtagcgcgctcacgtatgccagactcttcttagcgctaagccattttcccaggccgggttatgcagtgagacttcagggcaggcacacatgtcgcttcctgcacccacactggacagtcattgtagaaagtaagatgtgatgttaatagtctcttcttggagtcagcactgcttcacggtcctattggcatgagaaccacgtccccagctattcccacctgcacactggagggaagcaggaggggaacaaagtcaacagcaatgactgtcgctgaatcttaagtttattctggattgagaaaagtggaagaggttagaagctaacttggacattctttttgggggaatagatgtctctcatgcagctcattttccagtggattgcctgatgttctccaggctgctacagctatgatattttaaaatcaatgggcctttcctttcatttcgaactttcaatacagctgcagaaacaatgcatctgaacggatggactgttttggagatttatgcgtgttctgcaggctgacctctgcttgttgatcgtattacagcatgttgggcatgtcaaatgaatctgggcgttagcctacaaatcaagatttgctttgcctcgttgtgtaaatatcggcaaaccatgttttggggatggaaaattagttaatttggagatggtgggttattagacttcacttggtctgcacgtggtggctttgggatttgctgcttcaaggtttcaggatgacacaagccatcgggttgagtgtgtttgtttcagcccctcttgctgagcacttctctcttcctgttcctgtgctgctgggccttcacagcatggtgctcccaagctagttgctgaagctgtgggccattgagccagcctggagatgcatggtaggttagggtgctgtgttgcaggtctgtgatgcagttgccatatattttttgacttttggatcttcactcctcccctcattttggacattttctcagaatgaatgatacatctctgctttcagcctccctaagccattaatttacatgtcagatttttttgagtattgtagtttttttcaatatttatggaatgcttagtatttgtaatgcaacaaaaggtcagaattaataaggtgtagtgcccaagaggaatattttgtttccattttcaagatgattccaatttgagctgtctcctggagaagttggatccatttgtgtttctgagtgtgcttgtaagcagtcttaggggatctgtcactgcttactactaacagaagaacaccaaaataaggccaacctgctcccaggctgaatccaggagagccagtggccaaatatcagctctgcagccaccgttgcaagtgagactttgtgaaaggaaacttctcaccattaaatgtacattttatcttaaccgttgaatgtacaggatggttcaaatactaaaaactggagaaaagaccatgatggatgtcatttctccctgatgggacattttaccatatttgctttctctgtatgttgtgcgtgttggtgtttatggaagaaacacctacagatacagtggaagtccccttgcccccttctctgttctgttgaagatggtctgtctttcccatctggatctctttcctccgctacttctgtgtccttagacagtagatggtgctctgtgtgcatgaggggaagcacctacagtggtcgcctgctgaagatgtccttcagtggttggaatggaaaaacaattgttctgctacatgttgctctggttctttcattttacctgctctagaatattccatttagaacttaaaatatttcattacttaaatattgctttttctgttctgtgtgctgtaaagtgtatgtgcgtgtgtgctggcattgtaatgtttgtgcttgtggggaggatggaggagattctgattttgccaggggtctcagctacagcccctcagatcattgcaggtgatagggtttggaagtttgtccccttcaaatctcttgtggaaatgtgattcccagtgttggaagtggggcatggtgggaggtgattggatcatgggggcagatccctcatgaatggttcagcaccatccccttggtgatgagcgagttcttgctcagttagttcatgcaaattcaatttaaaggagtatgccccttccccactccccgacccctctactcatgctcttgccatgtgatgtcctgctcctccttcaccttctgccatgattggaagcttcctgaggcctcaccaaaacagatgctgatgccatgctttctatacactctgcagaaccgtgtgccaattaaacttcttttattaattacccagcctcagatattcctttagagtaatgcaagaatggactaacacagcaggtgtgatcattggatgaggaaggctctcggaatcattccaggtgcctgctctagactcttggtgttgctcttctttccttcatgaccttgaactctctgactccagcagtcccctctgcacatgcctgaactgcttcagggcaccctacaggtcactcaggcctccaactctggggtgatgcctttagcagcattgagtataaggtgacctggaggaggtgtgaagacctgcgcatgtggacagtttgaaagcctagctgaggcagctggaagaaattcatgggagtcctgcatcgctgaggtcaggggaggttctgtaaatctgggagaaaggtgcctttcctttggagggatggtgggtttcaatggtttgaaagagaaaaccatgctttgcatgtgtctttttaccaacccaatgagattgctgattttgcaagtacaagtcaccagattttagttgtttataaacttcagcttaaaaggtggggttaatagggaacaacataaatgagggcaggtgtgtgtttcagggatctttgtgcaacttttctaaatacagagttggttgtgacatattcagctgggggaaaatagtcgtctgaaatatattatggtttgtttgtagcttcagctagtacttttcattgtaatcatggctcaggtttctaagagaaaattaaaataatttaggatgttgccccacactattgggaggtgtagatgttgctactgcatctggaaagcattgtgacaacatgtgaccaagtattaaaaatgttctcacatttattcttgaaattccacacagagaaaggtgtttcggggaagtagaatattagcagagctatttgtaaaaataatgcacaggcatttgctgctgtatcctatgagcgaaaaattgggaagtgtgatatctgtgtctgcctccatactgtacagaaatcactgaatataggccagtgcggtggctcatgcctgtaatcccagcactttgggaggccgaggcaggtggatcacttgaggtcagcagtctagaccagcctggccaacatgacgaaaccccatctctactaaaaatacaaaaaaaaaaaaaaattagccggttatggtggtgcatacctgtaatcccagctacgcaggaggctgaggcaggagaatagtttgaacccgagaggcagaggttgcagtgagccaagatcacgccactgtactccagcctgggcgacagagtgagactgtctcaagccaaaaacgaactgaatatggctgacactctctccctcataagcttgcttgttccattaatggggagacccatgtaaggtctgggtgcagtgcatggcacatgggaagtgtgtgtgacagttaatggtggcgttttttaaaagtacatatgtctatagcagtctggaaaggcatacgccagaatgtttgtggcagtgacagtggattttataagtgatttttttccctttacattttttcttaaatatgcatttctcttttcctcaatgaacacgctaattatgtgaacagttatttaagaagaagtaacctgagtaatactaaaaatgtattttctgaggggcgaaagtatagttgaagtaaaaagttttagtgcactttccagaatgggctggatggtgactattttaggttttgaggatggtaccgtctctggcaactcctcaactcttgtagggagaggtacagacacaaattggcatggcgtgtttcaataaaactttatttacaaaaacacatggtgggctggatttggcctgtggcccatggcctgatctctgttctaatatgtcccattaaggacttttgtttttgaaatccactgatagtgggtcattccagcgcatagatatgttgggtttattttcactgttcacataacgtaagtttgaaacccaactgtcttaagttgaaaagtaagacatagcgtggatattgttttgttctttaattttacactgcagaatccttttaagaaaacaattcagtctatcttataaaggggagtggcattgtcccctgcttttcctgtgctggccccaggctgttttgaggttttttttttttttttttttttttgatagggtctctgttgcccaggctggagtgcagtggcgcgatcttggttcacttcaacctccacctcccgggtttaagcaattctgcaacctctacctcccgagtttaagcaattctcctgcctcggcctcctgagtagctgggatcacaggtgtgcaccaccacacccagctaatttttgtattcttagtagagacaggatttcgtcatgttggccctgctggtctcgaactcctgatctcaagtgatccgtccaccttggcctcccaaggtgctgggattacaggcgtgagccacggcgcccggctattttgagttctttatgttgggcatgctgatcccccagcctcagcgtctgatcgtcttggtaccaagtccactgcccgtggggcttattttgtggtgtgaggtgaagcagcagcatctgttgattttggggtctgtgtcccccagattgcccaggatagtaatagtaaaatgcctcgtccccggctcagcccttagtctcccattgcaatactcctgtttgagattattcacagttggggctcatgtctattgctgagaaagagaaatggtttttcttggtgatttttctcagtgctttgaatgttatttttgagttctggccaaacagagatgggacaaggtcagaactagaaaaatatgtcctataatcttctcaatgggagggaggaagaggttcccttaggagcatgaacttaggaaaggaaatggtgcgtttggtggaaaagaaggggggcataggctgaattgggacagtgcccttgactgacacagggagagggtctgagccccccatgcacttactgggcaggcttccccccgaagcaaggtggacctgcttccagtgggaggagaagggggagcactagagccctccgtgagaccattgactgcactggggtagttcagtggtgagcggatggggagaaggcagggccagcccccagcacacgtcaggcactgtctgggcacctgtgcattgctgcctacagtcctttcagagactcggcaactcagcgagagtccctcacttgcctgtgagctgctccacttggtggaggagctgctggggcagaggatactgagcctgaccactgccctgtgcttgttcctgtccccatggaggagcactggacttgtccaggggcacctagcagggatccagggacccaggcagggccggaaaggggatgttctttgcatggatttctgggaatgtacttggcagaagggaagcctgggagtgagctccaggcagaagaacaagcaggtggaagtgcccggttctggaagagcccagggtatctttgggggaagatggagacaagatttggtgggtccttgaatgctctggaaagaagggggagccattgcccacctcttttttttttccataggttattggggaacaggtggtgtttggttacatgaataagttctttagtgatgacttgtagagattctggtgcacccatcacccaagcagtgtacactgcaccctatttgtagtcttttatcccctgcttcccctcccatccttccccccaagtccccgaagtccatgtatcattctttttttgtttgtttgtttgttttttgactccgttacccaggctggagtgcagtgctgtgatcttggctcactgcaacctctgcctctcgggttcaagcaattctcctgccttagcctcccgagtagctgggattacaggcgcctgccaccacatccggctaatttttgtatttttagtagagacggggtttcaccatattggccaggctggtctcaaactcctgacctcatgatccagccgccttggcctcccaaagtgctgggattataggtgtgagccattgtatcattcttatgcctttgtgtcctcataccttagctcccacctatccgtgagaacaacaatgtttggttttccattcctgagttactcagaataatcgtctccaatctcatccaggtcactgcaaatgccgttaattcattccttcttaaggctgagtagtagtcattgtgtgtgtgtgtgtgtgtgtgtgtgtgtgtgtgtgtgtgtgtgtgtgtgtatgtgtatacaccacagtttctttatccacttgttgattgatgccactgcccatctcttgagatgcaacaggatcagacttgttggggagcaaggaggaaagtgggtggtgggaggctctggccctagtcagacaccgtagaccaagaaaaggagaacaggacagagacatgaaaatcagcaggtgagtatcgagtgtccagcacaggggccaggtgtccagcatggggacttcatgaggtattttaagagtaagaagtcattgaggggccgggcgcagtggctcatacctgtaatcccagcactttggaaggccagggcagggggattgcttgagcccaagagtttaagaccagccctggcaacatagtaagaccctatctctacaataaatgtaaaaaaaaaaaaaaatagctggacgtggtggcgtgtacttgtagtcccagcccctctggaggatcccttgagccaggaggtcaagactgcagtgagccatgatcatactactgcactccagcctgggtgactgagggagaccctgtctcaaaaaaaaaaaaaaaaaaaagaaagaacagaaatcaccattgataatgtggcatgaatagacttcatgacagacattactccagagatttttatgatgctttattaattaaagtatcatcttcaaagcagatgttaaccacttcatcactgtatacaaaatgtctgattacatttaatttttttttccagcaggatggaaatgcattaagatgaaactttaaaaatataggactgtagaaagattttgtgccaaattaaacatatactgaaacaaataagttgttttttgaaaacccagggagctatcacacgattgttaatattttagtggaattcctcctaaacgtctttctgtacttttttttttgagacaaagtcttgctctgttgcccaggctggagtgcaatggcactatctcagctcactgcaacctctgcttcccgggttcatccaattctgcctcaacctcccgagtagttgggattacaggtgtgcaccaccaagcccagctaatttttgtatttttaatagagacagggtttcaccatgttgatcaggctggtctcgaactcctgacctcaggtgatccacctgcctcggcctcccaaagtgctgggattacaggcgtgagccaccatgcccggcccctgtacattgtttttttaaagatgtttgagatagggtttgtagccttattaacacattagcatttttccgtgtcgtgttgtaatattgcacatccatgttactggtaagctgtatttgagaaagaattagggggttagtttggggagcagcagctgatgtgtgcctcagttctcaagttaattggtcctgctccttctctgccctggtgtgcccctcggctcgccactggcttaggtgcaggtacatttgtccttcatcggaacaggaccaccctcccttggctgccaccatggcaacgctcagccccgctgcctccgtttgtcatttctcctcctaatgatttgaactgaggtctgtgtgctggcccagcccgttgcgggtctgcataatgtatgaacacgagtgacagccagccgcagcccgatcaaaacaaagagccgctgcacgagaggggcagattgcggaagcatattgtgaacacattctctggtaactgtgaatcgtgtcgtaaaacgcgtctttggcctgtcaaaaatattttgacagggcccacagtctagctccttcatatgcaaatgcactggtaatgcctggataccagggttacacactcagggaaaatccacaggacgagggctgatgttagcagggttcattacttctgcaaataaacacgttgaagagcctccttccagtgggtaaatggcaaactcgataactggaatgctgtcagatcccagggtaacaaaagggtggtgtcccctaaaggcttggaaggattgagttaggagagttcaactgaaaagtcaagcatggcgcaaggaaggacgatggattagccaaccatgaccggccaggctgtgcgagctagccaaggagaggccacgaggcgggagagccaaggaggacagcctccgggtgggccatcactgctggtagagagggtttctgggtcccaggaccggactgcgtggtcctggttatacctgctggtcaaaggtcagtctgccaaggcccctccttgtgaagatggacactgagggcacccttcctagaggacctatttcctcttggtgctcttctgctttttgcttcttccctgggcttgctttccgtgtgattctgggcaagttggttaacctctctgtgcttaggtgaccttcgatggcacgggggatagcagtatctgcttcacatggtcagaaaattctgtgaggtgacacacggagccttggagctgcctgtggcaggtggcggtgctaattaagttccggctgttgtgacggtctcctcggctgggtggcccttcctgctgtcaggtgtggccactctcgtgagatgcaactggaggtgttttgtggcagcttctggaaggcctgcctttgacccttcctttctgctttttccatctgttacctgcatgcatatatgatggctggccaccatctgagactgggacagcaagggtcatgttggcattggaaggggtctgggtttatggggtcaccagcctcaagggacagcccacctggagattttgttaaggggtaagagaaatattcttctgtcttgtataagccactgttatttggggttttcagacatatgtggccaagtgattctaattagcatacaaggtgagaatgtgttatctgcaagatccagagcttagccgccctggcagttcagtgacttaaggggagttaatgaactggttttctgacttcatctcccaccaccagagcagtgttcgcatgaactgcccagccagctgtccccaggagctaaagaagtcagtttctgagcttcagagcctttggctatcctcggggtgcctcagagtagtgagggcagctctgggggactgggacctctcagcctcccctctgcctgtgtgttcctccatggagcccctgtttcgccacgtccattacgcttgcagtagtcagcaactgcctggtgagctttacatgcctgatgggctttggtgagctggcaagtctgaaacacacctggggtcatctgtgaccatctgctgatggccaagtttgatagggtttatttttcctttctttgctgaaatcgggctggggtcttggcagcaattgggaaactttgattgcttcagttgcttcagtttttctagctccacctggcctccctctggggaccacggttctgtcacctctcctgctatttaggtggccgtgtttcccatgctaaacagtgcccgctgatttaatcaagagacttgatagccggccattgcacgttcatcagcccggttttcctcttgtggcacctggtggtgtgctggtgtgtggtttataaaacatgctctgccgctttgatttccctgcttagatttacataattgttttagaagaaggttcaggtgctttgctggcagaaaaaggaagacgacctcttgcaaagtggggttagccctagccttgcaggaaggggtctcggcttccttccaaaccagaagcccgtggtgcagcctctgaacccccgactcttggtgggcttttgagttctgcttttgcttgaacttctagcggcagaaagggggtgatccctttcttctccatcataagggtcatggcccacatccctgtaacaaaagacaggttaacgagagaaaagcattatacatttacttgatcctggttttacggcatgcgggagcctacggaatgaagacccgaagattcaggggaggtcgtctgtgtgccttggttccatgacttgggggcagccaagtagaagtggaattggacaaatagggcatgagcgggccgggcgtggtggctcatgcctgtaatcctagcactttgggaggccaaggtgggtggatcacctgaggtcaggagttcaagaccagtctggtcaacatggtgaaaccccatctctactaaaaatacaaaaattagccaggcatggtggcgggctcctgtaattccagctactcgggggctaaagcaggagaatccctcgaacccaggaggaggaggttgcagtgagtcaagatcgcaccattgcactccagcctgggtgacaagagcaagactctgtcttaaaaataaaagagcttgagtgaattgtcatagatggagtggggagacctacaaggcctgtctgttcagattcctcttggcctctgtgtaacatttcttcctctcgggtatgggatgggacccctctggaatgagggtcttaattaccttatgacagctttacctaaaaagatgggggaaggttacagtaatatttttaggcttatggctagctttggggaaaaggggttttggtttctatgacctgtcttagggatgaagaattctagttcctgtggctcaggggagaatgaggggcaagagatcaggagagcaggagaagctcagagagaaacttggctgcatctgagggtggcctttactttggggtatcagttttccgagccccagcaagcccctccctgcaaagttgcagcccccagcaagccccccgccgcagagttgcagcctggtgccctgattttctaaagatcttgggtgggcggggcccacaggcatgggggaagcggtagctgaggctttacggcaagttgtggggcttctcacttgattttcccacaattaatcttgtctgtctcctgaatttcttcaagtcctgatgataaattatggcatatattccagaatacatgtttgagtttgcattggtgcattgctagaggaaagcacccagttcactgtgtatctctgtgtacctgtgtatttcatcgacacatcctttggagtcttaaacacagcagcagcactgttgtggtgataattacgcaccctgcatatggtactgtttaagcaacaaagagctgagacttcggaaggttcccaagggcatccctgagatgggactcggtcctgtcacaagcagctgtgggagctggagcttagaagctgtccatcaaaaaaccaagtttttgtgtcaaaatggagtctctcaggctgtgaagcaagcccatctctaatcagttcagccacctgtattgcagactaattgtgaccaagacactgcgaatcatcagagaaagctgagccttgtagggaatctggggacagccgtaagttcttcctccacattccattttagagaggcttgtgttccacatttttgtggctttttcctcatcagatttctctgtgttcttgctttagtttgaaactgagaacactaattttttttattttgatcaaaataaaaccatcttttcaaaatgtcaaaatgtttaattttcagagagaattgagtttacgtaccacgaaggaggctctgttttgttccggcacacgctttggctggttattggtgttaggatgtgtttgttccatgtacgagtggatggagcagacagtgcctggtccacccccacctcctcaccctcagcctcccccccgctgtagacagtggccaaccgtgtgtcctcagatctgcatggaatttcctgtggcgctttctcaattctgggaccagttttccctctgaagcgtgaatgtttcctctccagttgggaatctcctgcctcaggacctggtggtctagaggtactgtggtataagtagaaagagcagctggacttagagacaggcgtcctgagtgttgatgccagccttaccctgaccctgtgtgtggcagcagtgggtcggtcaaacctttccaagcctccgtgtcctcatctgaaaatgggaatgaggatgcctatccgaggtgacttagcagaggatgaagcactcccgtgagtgagctgcgcacagtctccttgtacaagcaggacatttctccgtttctccttttctctgcccgtaggattgactttcatcttgcctggtaataagccctcctaggaaaacaaattactctgaaaatttgtcattttggtgtggtgaattcgttcttttattcatcatccaaaaagttccattgtttgagatgattcaacatgatttggaaaccatggggtaagtctctgaggaacaagaagacagaagaaagaacgcactttggttttcttttggaaacctagagcaacctactagatcaatgagttttctagggaggcatcagagttagccatggcaccttctccaaagctgcctcgctcctgcactgatgctgtgctatgaggagccacgttgcccggaagtctgatgcgtgaggcgggaaggttaaaacttgttggctttggaggtttactgataggtcgttctgagtaggacaaatgttttcctttccgtgctttaaaagtctcatcttagaccgggcacagtgactcatgcctgtaatcccagcactttgggaggctgaggcaggtggatcttgaggtcaggagttcaacaccagcctggccaacatggtgaaaccccgtctctactaaaactacaaaaatgagctgggcatgggggtgcatgcctgtaatcccagctacttgggaggctgaggcaggagaatagcttgaacccggaaggtggaggttgcagtgagccgagatcgtgccagtgaactccagcctgggcaacaagagcgagactctgtctcagtaaataaataaataaataaataaataaataaataaataaagtctcatcttatggagcaaaagattctaaagagaaaggctggtcctgaatttcatccagcttggttctggtttcttctcctttcttcagcgagtgcagggcctttatccttggggcacctttctgggactttatctggctgtgtgcagacagacaggaaagtgtcccctgcccccaatttttgggatgaccactaaaaaatgaacacacccactcagggagcgtttgtgggatcactgaagtcaaataatttacacccaggagaaagcccttcgctgtggatgtgttcatgcctgtggaaagggaagttggctatctggtctcgaaccctcagtcactgtcagggacggcagagaactcatccagaaaccaagtgttgatgtgaagcctccccttccagaggccccccagcgtccactcccctaggcatccctcacttctggaccctccacatcagcatcccatgacattgggctagactcactgttccaggactccgctggcccagaggtgagtcggcctgaccaagtcgtcgtgtcatcacttgttgggggttgaagtcctaacgcccggtgcctatgaatgtgatcgtctctcagaatggaaataaggtcgtcgcagatgtaattatttaggatgaggtcatgccagagtggggtgggcccctcatctaatatgatggatgtccttctgagaagggaaatttggacgcagatgcacagagggagaacatcatgtcaaggctgcggtaatgcttctacaagccaaaaagaatgccaaggataaccagacagccgccagaagccaggacagaggctcgcagcagaccctccctcaccgcccctaaaggaacccgccctgctgacgctttgatcttggacttctggcctccagaactgtgagacaatgtatgtctgtttctgaagccactcagattgtggcactttgttagagcagccccaggaaactaaaacgtcacctgactcactgtgggattcagcatcttgtacgaggcaggtgccactggtctcagtttctttgtctgtaaaatgaggctaagacctgctttatacagtggtagtgacagtttgcccagcacctcctaggacctcaaaatgtgactttttttaaaagacagagccttactctgtcacccaggctgggctggagtacagtggcgcggtcatagctcactgcagcctcgacctcctgggttcaagtgatccttccacctcagccccgcaagtgactaggaccacaggtgcatgccaccatgcctagctaattgtattattatttttttttttttgtagagacagggtctcactatgttgccaggttggtcttgaactcctggactcaagctatcctcctgcctcagcctcctgagtagctgggattacaggtatgagccaccgtgctcggccttcattattatttttaggacaaaagtgaaggtggaaagttcggaccagtgggctgtatgtttcagaactttacacataggaagaggaagtattgtgtatggaagaaagtgagtgttgcattattcagggttctcagagaagcagaaccatatggaagaggaggtctgttaggggaattggttcgtgagattatggaggtccagaagcctcatgatctgtctgcacactggagaactgggaagactggtggcatccttcagcccgagaaccaggagctctgatgtccgagtgcaggaagagacagatgttccagctccaacagagagagtgagtttgcccttcctccacctttttgccctctttgggtcctcagtggattgggtgatgccctctgcatgggtgaggcagattatctttactcgttctactgatcgagctgttatctcttccaggaacaccctcatagacacacccacaaataatatcttaccggctgttggggcgttccttggcccagtgaaatgcccagtcaaactgacacgtaacattaaccataacaggtgtgggtagacagtcaggagagcaagactctagttggttctgtcacacagcagagctgcgtggcctgggtatactcctcccatctgcctgggctgctgtatcctgggctataaggtaggaggttcgatcagattaccctgagatgtgctgtgagaggtgagtgtggccccctcacagttgcagctcttcgaacgggagcctggagactccaggcctatgtcttgggaggtgcactgcacagggtggctgctctgtaaaccttgactgaagtcgtggggaaaactgcagtgtgctccaagaacaaattgtgaatagagactagttaaaataaacatcacaatggcgatggaaaatgttatttcactttattaagttaaaaacaagttataaaatagtaggtcacatataagctcagttttgtatttaaaaaccctcaaaactgtatatatgcccagaaaaaagacaggaaagaaagataccacagtatgaatggtggttcccaattagtaggagaactaggagccatcattgtctttgctttccagagaataatagcgtggtgtcctggagtcacatggctgctctggcttgccagtggagaacaggctgaggccggaggaggagggagcagccaggaagctggttacaacccaggcggagggctggcgtgggcctcaggggtcttcagcctcagcactattgacattttgtgccggataattatttgtcctgtgcatgtcaggatgttcaggagcatctctggcctctacctactagatgccagtaacatctcttccagttgcggtgaccaaaaatgtcttcaggcaatccagatcaaatgtccactggggggcagaatcacctgctgagacccactggttaaaatagtgtcagtaggggtggagagaaggggacaaaagagtcttagagccatttgagagggagcttctagaggacttgatggatggaatttggtcaaggcaggaatgagggtggatgtggggcatggggaattggacggatgatagtggcccacaggttgagagaggggatgggttcagctttggccatgctgttgtgagtctgtggttcccagggagcagctgagtaggctgttgggtgagtggttctcaagctcagagctgagctgggggcatccatttgaaggttatgggaagatggaaagcacgccctggaggtgggtgggtgagctcacccaggaccacggtgtggcctgagaagtcggcctgcgatagaacccggggaatcccagtgtttccagggtgggcagaggaagaggaggctgggaagggaatttgtttctctggccagagctgttgctcagcgactgttggctggtgaggatgaggctcatgaacagatgtggaaacatcgtgggatgatctcatggtgggtgggacttgtcgccgtcatgcactcagcactctctggcctttattggtcaagctgcctgctgtgtttctggtgcccaaatgttctgggcacactgttgtttggggaagaatcgcagggactctccttcactcttagatagtggcagcgcttgcctcgctgcatctcgtgttctcaaaatcagcacatgccatcccacattctagaccatccagttttgcttctcaggctctgaaaaacacttttaagagcaggttaaactgttctcggacttctttttggattatttgcaacgtcttgaggggtccacggattgatagagtcagcagggatggacagtttccccttcagcacctttatagttgtaatttgcccatgatggggttagagacccacagttgctcaaaagcagtttttgtttttcttgatagctggatttgggttatctctcaggaagcggttagcagtctttagggcaacctaattgcatttctttgtttacaagcacttaacttcatccctctcaggcgcacaccagcactgtctatcactaatactggcagttctagggtgaggtggacagttgctcttagtcagaaactcactttgctgttttccactagattcccagatagagaaggacagttgtttcaggcaagcttaagaccctgtaacatttcttgccctttttgatttgaactcccatctccctagctctggcttgttttaccctgcagttaaaagagaaaatgatctctactggctatatggcctcaggccaggagaaaaggtgctgttccttccagcagaaattcaagggtccagggaggctggcccaacccaggtcagaaggataatctcagaaaaagaaggaagcatgcattacccatctcagaacttaggaacaagaaaatcctaaaactccaaaggaccatttttccccactgacaggcccagcttaattagagaccagctaggagttgcatttcctggttgtttactgactgttctcttcggtaaacagcttcagcctgtaattaagctgtctaattggcaatgactgcaggaaaaaccatgaatggggctggcctccctctctagcccctgtgtctgctgtctgttacctaccaccatttttattcccctgtcttctattaaaaatgtcgtgggggcaaattctaaagaatagtctaggcaggcaaaccctttgaacttcactttgcaaacctgcctgagagtgagtctgagaggcaaattctttttctttccacttgaagaagtgtcagaaatttggtggattggaaaagatgggagagaaaagtccaggagtcctgactgctttcactcatttaggtgggctggcaagcagtgctggctgctccacctgttttcctgcctaataacagtgtcttttatagttgtctgataacaatgtcttttataatgtctcataactctgcctttttgtaatgaccggcctaatacctttgcctacaatagttcttttttcctctgggagtttaactcaggttgtgattagagagtatttcccataaatcacgcaaagcacatgtcctgcccaccagccaattacagaaatggagttggtcagacctacactttatctgaaacaatgcataatgggagttttgaactaaaaaaattaccctctaatgttacaaatatgattcaggcaaataaaactgcagatgtatgtgtaagtcctcagtactgcgattctttctttctctctctctttctctttctcctccctccctccctctcttccttccttcctttttttttttttttaagtgtcctggttgtgttagggtaatttgtgatttaaaaagaaatgcctctcctctccccgacccgatttttttttttcttttttggtaggatgcctccctttgcattccaaggcagcacttcaagcagcactttggtaaatgtcaaaaagttggagaggctgagtgggttgcgtggcccgtctgtgcctgtgggctcctctcccgcccacgcggctgtgcctctcactcagaaccctgcctctcttgtgtttgtcccaaggctttactttcccccccacatacgttcagtggcattatttgttacatttttaaaaatacatattttatttatttcacaaacaatgttactggcataatgttaccacactataggatataatggttgaagaatgatttcccataatctaatttcaacacattacctgattcagtattctgtgtcctctccagccttgcttttctctgtgcacaggtatgacctgattccagtgctttttaagaattattagcattttctgcattgctccttggccttcacagttatcatttgaacagtggcacaagattctctgaaactgctcctctgtcttcattcccattttgtgagcatttaagccgtttactgttgattgtccatttcttcaggtatcttcttacatcatcttgcttctttactcagcataaagcctcgtagtagattctcaggtcccaggggtgcacatgcctgtgtttttaccttacttccccaggggccctccagagggtgcccatccacggagtgcggcgcctgctcgacttggccttctggcactggggattcctctcccaagtcttgctagctcgtggcatgtgcaatgggatctctttcctgagtgcgcatttctttcctcacatttgggggcattcagtgggggaggatttacaaagaaacttgaggtgaggggccctctgcactcaacctcctgggacctggggctgcacccactggcattgattagaagagagcttgtgactgaggaaaacctggcttagggatttatctgcagggactgtccccagtaggtctatgagagcccaccacagcagcagccctctggatggggatttgggtcttggttttgccagcactcccagtggacagtcatgcctggacttgtcttctccaccttccacttgtcctaacagctgtcgggaccatcatccaccaggggccagctgtccagaggcagacccaccctggaaggcaggccagcctccgctctccacaccagcttggggatgaatcagcgggtgctctgaccactactttcccaaggctactttgcttcaggaagttacagcagccatagaggactctgcttatgtgagatgtgcagacataattcttgcttttagaaggaggggggaaaatagagaagtagttatctcattgtcttggaataaaattattttgctttgcaaagattaggcaaatcccaggttgctgagtcttggcagatttctcgtggcctagactgtggtgtttggggccgcctgtctgtaatgtgctgccatgacaaggcacggtggtggtggggacctggcaaggtaccgaacggtggaggtgactgtaggattagccccggctttgcagcaggttttcttgggaggagaaaatacacagttgggacagactccagggaccagctccttcccccttttttctattgcagagggggaaactgaggctcagagagggggactggctgtgcatacatggattctttgaaattttaaaggatggccaggtgcagtggctcgcacgtgtaataccagcactttgggaggccgaggcgggtggatcacgaggtcaggagttccagaccagcctggccaacatggtgaaactctgtctctactaaaaatacaaaaattagctgggtgtggtggcgggcacctgtagtcccagctcctcgggagactgaggcaggagaattgcttgaacctgggaggcggaggttgcagtgagccgagattgtgccattgcactccagcctgggcaacaagagagagactgggtctcaaaaaaaaaaaaaaaaaaaaaaaaaaaaagaaagaaagtttaaaggatgttaaaaattttccacacattatcttttaatgtgttgtcaaggagcaatgatcatcataatggcactggggaaatggaaaaaactggaaaactctcttggtttgacagaaagggatagatctaactgtttagtgttgccaagtgagcccccaaacatctcccctggaaaagtcattaggaatttaccatctccatctgcaggggccaagtgagataaccgtatctagtatatccatctgagcaaaaccctgtttctcttcccttgaataggaagccagaaactgctgcagcgcactgttgaaacatagcttagaaatagatactttgtggggggaaaacaacctacttatctttcccattatgctatctcttaatagggcccctggtatctgagccagcatacacatttggttcttctgtgtcctgtgatcttcctctgagtgaaaactgattatctactcaaaggaagcagatgacagagcccccgtgatgtgtgctgcctttgctctgtgcctctgtagtaagggaggcctggaatgagcagaaagatggctcccctggccacaaaggggggtcagtctattgcaaagcagccttcacgttctggaagcagggagcagtgggagcccgggaaggtcagccttgcagacttgtagatgtcataggattatttgagctgcttccgctgcaggtggttgggaagtactggatggaatccttggaggcgagatgagaggatgggagaagaaagtctggaagaacagttagatttcttcctgattagataatactgagtgagagtgggaagaacggagcggagcctgttgccagcgcgatctctgtcccgttcactgtcatgtggcctcttcacggatgtgtgtgtgtctgcagggactcctgagagctcttgttgatgtttagcccttggacctgctggtgcttacacatacgtttccatggagtctgtaccaaaaccacagaggatcgcccccgtttatctgagagtagctcatcatcattctctgcttgggtgtaaatagctcactgcagaatcttaatccccagaactggagaccaaccattttctctgcacttggagggaaccattcaaacatccctgttgggctagcatgaggaaaagccaagtcaggcgcttggccaccaggggatcttggcaagagaggccgtgggatttgagagttagaactgatatgcagcacagtgcaccttggtgccagagttctgaccagtagtgttgcgtccattggtccactatgatccatggattgggaacccctgttactgatgtgttgacgctatagcaatattatggtgtgtcagcttcgctgtctttcaaggatgacttgcgtagattgcatttaagtatagtggagcaacagcaatcaaggtgtaagacttttttttttttttggagacaagagttttactcttgtcacccagactggagtgcaatggcgcgatctgggctcactgcaacctccgcctcccaggttcaagggattctcctgcctcagcctgctgagtagctgggattacaggtgcctgccaccatgcccggctaatttttgtatttttagtagagacagggttttaccatgttggccaggctggtctagaattcctgacctcaggtgatctgcccacctcagcctcccaaagtgctgggattataggcgtgagccactgcacccggccaaggtgtaagagttctaatcttaggccttcattctgccatatgacaaacaaagtagaattacagttgaaaactaattaactctacataaaacaaaaatgaagaggtgggctcacatacctatctcaaagttgctctggaagatggatttagcccatttaaaggaagctaagggatagaattcatgagaagtgaggtctccggctttgtatttattagggcactattattagatggcaacagatagatcccaaattctcaatgactaaccaaagggatgtttattgccctttcacattaggttggaaagagatgcttctgcttagtaacgctcctttagtgactgggctcagccatccagggccaccgtgaaagaagaagagttcagagaatgggtcattgcaggggtttacgccccaggcctggcaggggcacacagcattgcacatcccccttccatgggtcagcacgcagtcagatgaccaccccttcctgcagagggaggtggggagacaaggtcggcctgagtgtccaggggaaggagaaaaccggcacagaaacaactagccagtctctgctacctgtttcttgtgttaaatcagaatttataggaaggtgattttttaaacagtttagagagcttttctaatttttgagcgagggtcttgtctgagaattatagcttgagataaggacttcagaatctaacaattctttgctccattgctacaatttccccaacccagaagtggtgaaaccaagtctatcaagcttcttggttgacatcaagaaggttgttctgggcgggcgcagtggttcacacttgtaatcccagcactttaggagtcccagatgggcagatcatgaggtcagaagttcgagaccagcctggccaacacagtgaaatctagtctgtactgaaaatacaaaaattagctgggcgtggtggtgggtgcctgtaatctgagctcctcgggaagctgaggcaggagaatcgcttgaacctgggaggcggaggttgcagtgagattgcgccattgcactccagcctgggcaacagatctagactctgtctccaaaaaaaaaaaaaaaaaggttgttttgtttggtaaacagaaaaggagccatcttaagataatgcatctttatttaacagttatgaatagaatctctcaaggtccaaaatgaatcttttgaaagaactagaaattcttgcctgtaccaaccatattagcaagacttgaaatgcaacattctaagatgtgcctcaggaataattttattgaccaaaaccagacgtcagcttgcagccttgtgaagcctcctctccatgtaggaacggggggcattttggttagctgggttaggcttgctgaattttaacatgacatgcttgcttttcctgtgttggtgtgtcgcttctctcccttgggcccccgcccctaacttttccacctgatctctgacttctccatctttctaacccctgaacaacaactagagataagttcaaggtcactgctggaactgacctttgggtgcttgggccacccttaggccttgagaggcacaggctgaggccttctgtacaacctcctggccagtgtggaggggccgggctccaagcaagcttgtccatatcacagaaagtcaagagtcttgccgcgtgcggtggctcacgcctgtaatctcagtactttgagaggccgaggcgggtggatcacgaggtcaggagatggagaccatcctggctaacatggtgaaaccccgtctccactaaaaaatacaaaaaattagctgggcgtggtggcaggcgcctgtagtcccagctactcgggaggctgaggcaggagaatggcgtgaacctgggaggtggagcttgcagtgaaccgagattgcgccactgcaccacccgagactccgtctcaaaaaaaaaaaaaaaaagaaaagtcaagagtcttcacaatgaatgttgacagtaatacaaggtcagctttttgtttgctttttaaaggttccagtctggtcacaactgcatgcaactgagttttgtaattatcatcttaacaatgtgatcacagtctgccctgccattaaagtatttacttgagggtacccatgtagcatgactgtctcagatcagattgaagccttcgaacttgctttatagaggtttttagagttgagcaatcacatttcttttttcttttctgagacaatgtcttgctctgtcacccgggccggagtgcagtggtgcagtcatagctcactgcagcctcagactcccaggctcaagcgatcctctcacctcagcctcccgagtagctgggactacaggcgcacaccaccacagccagctaatttttatactttttgtagagatggactcttgcagtgttgcctgggttggtcttgaactcctgaactcaaatgatcctcctcccttgccctcccaaaatgctgagattatgggcatgagccaccatgcctggctgaggaatcacattttaatagcctcacaaagaaatcctagtgttgacaatataggtttttaggtctggaatgaacttccattctagtctaatttcatcctgattttactgtccaggctcttggctgaccagtgtgtggagaccctggtggcagcctagggatcccctccaggtctcttccttgtccttactgtagaccatcacaccgccactaatttcccccctctggccaggtgagagcagattgtcaccatttcagagaaatttgaaccaatcagaaagagagctcaggagtactggggtgactgagatgagcacatgtggcttcttgaggaccttccaacccccaagttattcttagaaagctgcacacaagccaggcagctgtaggctggcgttgaaaagtttttagctttagctaattacattgtgggagagactgactggggggtgtccatcccgtgtgtgccatgctgcctccatctctttctccctctcttctgagaccttctggttatccccagctacctgcccctccacctcctgtgccctcagggtgggcagtttgggtttctttcctttttcttttgtctgctgttgtttaggattgtgaaagtgcagcagtgcactctgtccctgcaacaggctctgcggtgggctagctccagtgttgcattctcccttcatcagtggagaaatgcactcttggaaccatgaagagtctgcacatgacagctctgcactcactaacattcaagcaccttgattcagagtttcacgagactaaggtgaggttacctttccctctctgttgttcttcccgtggaaagagggttttctattcacactgtacattcagccacagctggaaacctcatcttcctcttccagttaagacagtcatgtggccgggcgcggtggctcatgcctgtcatcccagcactttgggaagccgaggcaggcagatcactaggtcaggagattgagaccatcctggctaacatggtgaaaccccatctctacaaaaaaaaaaaaaaaaaaaaaaaaaaacattagctgggcatggtggcatgcgcctgtagccccagctactcgggaggctgaggcagtagaatcacttgaacctgggaggcggaggttgcagtgcgccgagatcgcaccactgcactccagtctaagtgacaaagcgagactgtctcaaaaaaaaaaaaaagtcatgtaattgtgacctcagttcgcaggacttcggaagcagggacccctcccctgtacccccgccaaagccaccatggtagctcctcctaattggatcttgggggactcggaacagggtttagcctgagaatgtgacttgtgagaaccccagatgagagtagttacacttttctggaaggcttatttaaaaccccagaacattcttgcattggaattgagttgcattgctctctgggacgggcagtgggctcttggaagaggtaagtgaagtcactgagtgggacgctcctcgggggaggattttgtggggcagtgggaacatcagtctttcctaggctcaggagtgagtctagaggccatgtttatgcacaggaagcatctggaagcttattaacacagattcctgggccctgcccaagagatttcaattccgtggggccaagcaggccttgagactatgcagttttaatttattgttttacttttatttaaagacagattctcactctactgctcaggctggggtgtagtggtatgactgtagctcactgcaacctcaaccccctgggcataagcgatcctcccaccccagccttccgaataactgagactacaggtgcgcatctctacactcagcacattttcttattttgtagagatggggtcttgctatgttgcccaggctggcctcagactcgtggactcaagcaaccttcctgcctcagcctcccagagtgctaggaatacagatgtgagccacagtggctggccgagattgtgcttttctagcgcctcccaggtggctgtgctgatgctgcttgtctgggaccttgccctgaggagcactacgctgtaggttctatcacggtaacgatactgtaatgtacagtgcatcagatgtcactaatttaaagatctaggctgatgaaaatgaaaccaattgaagtacttcagctcctccatgcaagcatgggctggcttcccttattttactgtggagtgccttttataccagagtagtggctttctaatgtctgactcaggttaattgatgagattccaaggcaacacaattcagtaaatcaaactggatgaacatcctctgccatcagaaaaatatctttatgattagatggtgatctttggatggaaaatattaaaataagaattgattaaaccagctagggatggtggctcacgcctgaaatcccagcagtttgggaggccaaggtgggtggatcaccggaggtcaggagttcgagaccagcctgcccaacatgaagaaccccgtctctactaaaaatacaaaaattagctgggcatggtggtgcacgcttgtaatcccagctactccagaggctgagacaggaaaaatcacttgaactcgggaggtggaggttgcaatgagccgagattgtgccactgcactccagcctgggtcacagagtgagttctgggagttgggtttgttcattcatttgtttattcatctatccatctgtccttacgtccttccatccttccacccacctagacatccatgtcttcctcctcttctccctctgcccactcacccatccatccattatatgttagttgagcatgctctgtttcagttctgggcactggggatatggcaaagaagtaaacatagaaaacataaaactctgcagtctcatgctgtggcaagtggtgccttctgaggtcctgagtgttcctggaaattagcttgctctttaccctgctctgctgaagaaaaccttggcaaatagggcacagaaaactcaatgtcaaaaacgtaccaattttcagagtaggaaaaagtgtgttttttgcagattgcaaatctgtgagcttagcttcaagtaaaactctagaaagacttattaaagaaatgtcctataaaaagagctagtatgtgctctgaagacctgggtctggcagagcagcctctgacatgtgtggcaccattaggagacagccaagatagagaccctggccaggcgtggtggctcacgcctataatcccagcactttgggaagctgaggcagacagatcacttgaggtcaggagttcaagactagcctggacaacatggtgaaacccggtctctcttaaaaatataaaaaattagccaggcatggtggcatgctcctgtagtcccagctactcaggaggctgaggtgggacaatcagttgaacccgagaggcagaggttgcagtgagtcaagatcgtgccagccagtgcgctccagccagagtgacagagtgaaactccatctcaaaaaaaaaaaaaaaaaaaaaaaaaaaaaaaaagagacacccttgcaggcagtggtcacaggccgaggaacctggtggacaaggtggggaacgactcaatggatgatgataaacaggaagttctagtaccactgagaaaacgatctgccagatatctccatcagcaatgttcttaacatgttttgtttttgacatactccagtcctcattttgacaagcttaagggaaacatatttgcagtgaatgttgcagacaaatggttattcctgatgtttaaacagcccatacaaatagattggaaaaacatgaagattcccataggcaaatagacaaaaaccaattaatctgaaacgctcttattgaacaaatcagcaaagactaaaaacagtgatgtcgacgacgtagacagattcagccctctagtcatgttgtggctgttggcagattaagcctgtgtgctggtgggtgggctgggagtgagcaacgttgagccccccgaaataatgatggtgggaagggaaacctttttataaacttgtttggaaatgtgaatgtatgaaatgctggcttcctttgactcaggaattgtgcttctaggaatctaagctaaagagattttcatagtaattgacaggttgatttatatttatactcgtatcttgttccagaaaggataaagcggtccacggggagggacaggcatataaaggcagcagggcacccagaagacagcttgtcttgatgagaaggagaaggagccctgttttacagcaagtgtcttttggtatgaaattcttagggtttggggcaccccttttgttttttgaacgctcgacttttttgatggttataattgagaaatacaggatattgcaaaccctagaccatatcgaagggggcaaacttaatttcatttgaaagacacctggagtgggcaggagacatgctgatcagctttccaggtggcagaggcagcttttatagtgacttccctgactggtcaactggaagcttgattgaatgtcctgtgtccctctgggagcagcccacctgtcactctgtggccctgcaacagggccctgcttgtcaggagatggccatcttagttatctgaccactttccagccttcagccacgcagccctcagaccccccctaccccccaggccactgtgtccctggagacccctgtcctctgcatgcttcctactccttagaggcccatcagcctccaagagccaccctaagcaagtcacctgtctgtgggtgacagcattgagtccatgttaagagagcagcctctatctgtctgggggtggagagcccatgtgattcaggagacaccacatcatcatttcagagccatcactgaacatcagggaagagaactcaagggtagagttgaacagaaacataagtgatcctaggccgggtgcggtggctcacacccgtaatcccagaactttgggaggcccaggcgggtggatcacgtgaggtcgggagttcaagaccagcccagccaacatggtgaaaccccatctcccttaaaaacacaaaaattagccagttgtggtggcgggtgcctgtaatcccagctactcaggaggctgaggcaggagaatcgtttgatcaggggcagggagcagggtgggcagaggttgcaatgagtcagctactcaggaggctgaggcaggagaatcacttgaatggggcagggtgtagaggttgcagtgagccaagtttgtgccactgcacactctagcctgggggacagagccagactctgtctcgaaaaacaagaacgataccagtaggtgttctttgacccatcaacaggtgtggggaggcagcactgcaccgggaaggataagagggtaggctttgctgtctggccttgggcaagacacttgacctctcaaagcccatttgctgcattgtaaagaggaaatcataccctacagcagctaaccctcttaccttgctacttaagggcacattccggccgggcgcagtggctcatgcctgtaatcccagcactttgggaggccaaggcgggcggatcacgaggtcaggagatcgagaccatcctggctatcacggtgaaacactgtctctcctaaaaataaaaaaattagcctggtgtggtggcgggcacctgtggtcccagctactcgggaggctgaggcaggagaatggcatgaaaccgggaggcagagcttgcagtgagccgagatagcgccactgcattccagcctgggcgaaagagcgaagcctccatctcaaaaataaataaaataaaataaaataaaataaaatataacataacataacataacataacataaaataaaataataaataaaaaagtgcacactccctggccatcagcctcatctcttctacctgagtggattaagtagtaaagggggagctatccaagacagattttaaaatggtcagtttgagtaaaccaagagataggtttaaaaaacaatgtatgtttcactcagagcataaacaaaattgttgaagagccagcctacatgcaagtttaaaaattaaaaatggccttatgtattaaaaacaatccaggctgggcacagtggctcacgcctataatcacaacactttggatggccgaggcaggcggattatttgaggtcgggagttcaagaccatcctggccaacatggtgaaaccccgtctctactaaaaatacaaaattagccgggagtggtggcaggcgcctgtaatcccagctacttgggaggctgaggcaggagaatcacttaaacccgggaggcggagattgcagtgagctgagattgcaccactgtgctccagcctgggtgacagagtgagagtccgtctcaacaaaacaaaaacaatccatgttaattttagaaagtacaaatacagaagcagaagaagaatctgacagttatctagaggagattttaatcagtgtcctttaggttcattcgttgcttatttcaatctggattgggacaggatgacaaaggcccatgaagggattttatatataactgtgtgcttagtgtagcgtgggtgtttgtgttttatcgcctggcctctttgtggcatgtgacatctttgacaggaacaccaattgattcctctgtgctcaataatgtcttcactgccatggtatttcctgcacagctggggatgcttaactgtgtaactacaatagcaagataagggaaacagattttccaattggatattttaataaatgatggcttcagaaggggcacaatattctacgccactgattgaatgatgacaagaaatattttaatgggtgcattgctgtcgcagtgtagtaaaaagtaaagaatggttcaccaagtcagaggtcatcctcagatgtccctatgtgtctgttagtggagataaagtgatctcaagacggtgacacatttaaagtgacgtgaactagtttattagtagtcagtggtccccccggccacttctaaagatgacatgcttctaatcatacccacaggatttctaagatcctttttttttctcttatcaaatgacagtgcttgatgataatttcatcagaaaggtctccatcactagtctctgctttattttcacgtaggcaagtggtctcaagaaaattggaataaaaatattcaaaataatttctcccagctatatctggagcaagattaaacaattataaggagtaggcagtatgttttcaatccctgtgttgtctttgtcaccatgatttgcattcatatcagaaggccagcaaactcggaaagaaaatgactttctgattgaatcatatcattttaaacaaagctctttcatgaataaagaatattaattactatatccagaatgatcctcttttttttttttttgagttgtgtgttaacagaaacctttgtgcatttgacacaaggtcagcatagatttaacaggagacataagctttgaaaatttattcatgctggaattgaacatggaattaattaaatgtacagaagctggaaggtagacaggtcgttgtctccatttttgttctttaaagcactttattccattgggatatcacaatttcgtagcctggtatatgcattccttgtggtgtgtattaataaattgagtaggtgaaaaagacaatagatggaaagctggaaagtgatgtggcctgaattcctttctaggtaatttcaatgttggtcatgcccagggatctccttaagtgttgcagaatcacacctggacaacccaggtgcccagtccttcattgcctcatgggctctctagtcttacttttgatcccttttcctgtatttcaccagtataatactccccactcctagttgggaatatctaacctgtgttgagtacctgtatctgatgagttagtagctgtgaaaacgtttctctagcaaggctgcctgtgagtgggatcccaggccaagcagttaactgcgttccagcgaagcaggtgccccgtgtgttgctctgcaagtccacatggagcaggattccttattttgtgaagaaaggatctttagtgccacgtgtgtatttttaacacatttccaaaagcatgatttattcaggattaagtttattcagtagaaatttccaaggtatttttttaagtgaggcaccatcctggatgctggggaagaatctttgttggaatatgaccctgggttttgtatggaaaagggagggggcagtgcaggatgtggcaaggcagttgttggagctccgatacttccaataagtaactagcagggctgtacacactctaccaggaaagacaaagaaatgcagagtccagggaagcagtccatcgcacgtttcttccttccctgcaagggcactggagttctccttcaccaggaagactgcagcccccattctgattggcctcagggggccgctcctgctgatgatggctaatgaggacaagcagtagagaatattgctttcatttatcttggtgctttgtaccttgatggagacagatattcgggtttcaagaagacaactttttttgcagggcaggcattgtttgcttgttttaaggctacgttcagaagcacgagaacaaacaacagtttcaagcctaacacttgggtttacatgaagctaattgttagatatgagttctaaatttcttttcaaagaatcagtatgtcagtatgttcagttctttgccttctacttctaaacttaactttctcataaagcaacatttttcgattacctgctccaccctgactcatttcaatcacctgctccaccctgactcattccgattacctgctacctgctctgccctgactcattctccaccctgcataaccatttttcccaccgaaccactcaccgggtcactctctttaaattagccaattggaattagtttagcctgtgcggtctaaccctagccaacaggggaacgacacagcagcaggggccacgtgagtcagggataagaaccccttccctcccttgtccaagtgtgcgctcaccattgctccatctgtaagggcgcacccttctgtagaagtaacttgccttgctgagaattaaaaagaaaattttatatttgagtgctatttcttttgtggcactgaaactttatatataacataatgttgcagtcctttaacataacagaaaggaaaaggagaggcatcctattcggttttgcactaggggtccccactgaaattgctgaccacaatcacatggattatgatttaatatttcagcaagacatgcatgattttaaatgaatccaattaatattccattgaaaagtggaaaccagagtctagataagctgacccagctctcatgcatgtgctgttaactttcctactttccccaggagtatcacagtgaaattgagccatgagggactctctgcttcttacagttggaagcctctggacttcctcctcagagacgggagatcttgtctctctcaatcctgagttagtctccactttatagctgttacttcagttgtagggcactgggtagccctggagttgagttgttcaatgcatgaccttgtttatgtcgctatttgagtttttactgagaaaaaggccttctgtgaatccaaatgtgactattacacactgaatcttcccattactttaagaataagtgatgttgttgttgttgttattattatttgaggtggagtttccctgttgtctcctggctggagtgtaatggcgccacctcggctcactgcaacctctgcctctcgggttcaggcaattcttctgcctcagcctctggggtagctgggattacaggcgcccgccaccacatccagctaattttttatattttttagtagagatgggggtttcaccatgttggccaggctggtctcgaactcctgacctcaggtgatccatccgcctcggcctcccaaagtgctgggattacaggcgtgagccaccgcgcccagcccagtggtgtgattattccataaccatggtggtgattcctgtgggctaaactgtgcctcccagaatgtgtgtgttttaagtcctaacccccagtgcctcataatgcgattctatttggagacaggttctttaaagaggtgattgagtcaaaatgaggtcagtagagtgggccctaatccagtaagactgtgtccttataagaagaggagattaagacgcagacacacagaggaaagaccatgtgaggacacagggggaagacggcatgtccaagccgagagacctcaaaagagaccagccctgtccacactgtgctgatctcggccttctaggctccagaactaggataactaggtgtctgttgtttaaaccacacagcccgtggtactttgttaggtcaaggctggtaaactcgtacagtgatggcttcaaatgttatgaacattaaaatctttctattgctagggaaggtcattaaaaccttggtggccaattaaatatttatggattttttttcctttacacttttgcaaagcgttttttctagtttgtgcataccttcttctattagcaaaatgtcttctattaccagctttagaaataacggtgctgctattttccttggaggggtctgggttgacagacctgcgaaaggtctggatgtgttcagagaaataagcgatttttccaaggcccaggcctttgtactgctctaattctatccagaatgcttcggacgggaagaatttatggctttataagtgagtatttccgtattagcaaagagacatctacacttgaaagactttcctgcagcctcccgggggtcgaggtcaagagtctgggaggaggtgtggagcagagtgtccgggtgagagggtgctgggggcacgtgcccagcaggggtggaggggtggacaggctcaaaagagagacctgggcagtggacagggctgggcttccctggagctgttggcggggcagagccagctcaaggaacagctacccagcctttccaggaactctggaaggaaacggggacttccctggtgagggtgggatttgggagataatcctaatcactgggctgttctttgtcctttgacattcaaatgaaatgggagcctgttttaccccaatcagccttgagttttcggcaccctccccctcggaatacccgtgagggaccttctgtttttgttgttggtgttttactaccatttctgagtactttctccgaaagctcttttagcacgttgcttttctctctgccctccctcctcctctttcctcccttctgctctcactctgaagcagcccagcagcatgtacagcacttgctttcctttgagaggccctccattgttcccgccctgccaacttccacgccagcctccttttgcaagtccacctgccgttctgggcttgccctggggaaggccctggagctggattcccacaccctgccgagtttgtgcgtttctgtgaatctgatgagtgggttgtggacttcaatccagccccaccctttacagtgagatccagggacctttttaacctgtgactgactttttatgtctttctatgtctgtaaaatcgggataataatagtacctacctctctgtggcactttgggggtagaatggatgaactgaattaacgtctgaagtgccacagtgttgtatctgagtgagtagcgtcctccttaagcattggctttggtgcactgggaaggggcgtcagctgggcaggctgagcctgtcacctttttcaaaatttccaacaactgtggcttcttgggaaatcctttggcagtcagggtgctatatgaacacatgttttgtgggtcacttgccaggcgtcagtgccctgctcggggtccctttgcagctcccctgaacgtgccatttgaagcatagcaaccattactttgagaacctgtgcaggtccaggtgccgagggctgtcagatccctgcatcaactctggggatgggttcaattattatcctctctgtaaacagttctcagttattccaagtattctatttcttaatggatcttctaagccctggatcaatagtgtatatttctttgtctctcagttggggccctggcctctgcagataagccctcggatgcgaaatctggggaaccagccagccacctctggtcctgggagggtcagggactcgtgaatcaacatctggctctttgtgcacaatgggcctggcatgggcccaggctggtggggtgggcagggaaggaacaggcccataggcacccctccatgggcccctcaaggctgtagacccctctgtctgaccagcatcccattccctgaagtgaagcagctgccaccaggctggcttttcccaggcagtcacactctgggatgcccccacccctcagcacacacagtgactgtgttttcatgttttccaccaagggagggagggacaggctttctcaggggggcggccacccaagatcagctgcggctgaggatttttgtggctaggggaagaagtgaatcaccctcttctctgtgtctttccctaaccactggagacttcatagataaacttgcggggtcacggtgagggaggcactgtgtggaagggtaaatgggcttcctgggggtttagtacaagttgaccaaccttcttgttggtaacatgactgaggcattacctgcactgattaagtcaaccatcaagcagcatttattaagtagaacattgataagggcttgagggtgagagaagttgtccttaactgaaggagggggttctataaatggaagtgtcagagcagggtgacagatgccaaggaagagtgcccaggtgtgcacaggtgtgcccaggtatgaggggagaagaaggggtcagggccagcagggaaagagcttggggactcctgagtccagctcccagtgatgtgtagagttgagctccatcctgctgatcccagcaggagatagtggcgagactgggtatggtgtggttgggaactagaaaggacactggtgtgtttagatggggaatcttgggatgcaatagaaacaacctctgttggttttcagcattggagcagatgctccccatacatcatcacatcttattgtcgcagctaccgtattgttcttgtcccgtttttgcagaaatgaaaacctgatgcagagcctcaaggtcactttcccaaggtcacatgtggtttgcatcattctggccttggagcccagcctcttagccactcagtgcaactgtggagactggagggtgtcggggcgttgaatactggttaaggaaacggacgctttattctgcaggtgacagggactcactgagggctccgaacagaattgtaccctcagactctgattgcaggagtaaggatggtttactgagagtaggctacgtctgggggtgggtcagcaaggacgtgtgtgctgtgggaatcctgagacagatgaagaggctgtgaacagtagagggagagtggactcttcgggtagttcagacagatacgcaggtggggagagattggcaggcggaggagaggcttttgttgagggctggagggagggaggagaggcaggctgtttctgttttctgttaagtgggacgtaatcgagtgttttcctctgccgcctgaaggaaaggcggtgattgtgattgagggtacagggtccatttgccaactctgagcgggagagttgggtgtgggcgggaggcaggacattgagggagctctgaagtcatggctggaggccatcctactgaggggatggggcagtgatagtttcaaggaatcctaggaatgggaaagggggctggccagggctgtgggggtgggggggctgtaggatgctggaagcagccccagcacatgtgcatctgcagcgggacttggtgatgtggacttggggcttccgatgctcgtgctagcctgaatctccgggagacatggagcatctcagggtggggtcaggttcccaggtgaagcccctgctgctgatctgtagaccgtgcttggagaacactggtccagtgcactggagttcgtacagatccgcctttggggcatgcccaggggggtcttacaggagccagggacaggtggggccatgtctggagtagacagtgatacagtgatgtcccttggcctctgctggacagagaaggaggcgccaggaggcagctctgagttgggatggaaaggatgcatgacagtcagcttccctacagctggaggggaagttccagaaagaaaggatggccaacctgggacttgtgggcagggaaagggcttttggaggccaagattgtagggcagtgttatcctgggtgagttggggtatggccataggagggggctccaggaattcagggaaggaaaagaccatggcgctgaggaggcggcacggcctggccctccacctccaagctgaccaccctactcagctcctttagggtggagtggctgtaaggccgtgaccaggaaaaaagggacccagggtggtggcacatgaatcccagctttgtgtatccactcagttgcatgccaggtagtcacatcttaacttgtggcgcggctttagagagtgtctgtgcaggctgcctctgatccctcagtcagtgtgcagagctgagctgatgaggaaagtcttggtatgtaaccaaccaggtctcaccttcagccacactcctagggacagagtgcgtccatggaggggaggactcacagcagttttgaagtaatgtagattgtgtggccatcccaatttagtttatcattcccctacttggtctgtctgccttcatggaagttggtgatttttttttttttttttttggctctgttgcccaggctggattgcagtggtggcatctcagctcactgcaacctctgcctcctgggttcaagcgatttttctgcctcagcctcccaagtagctgggattacaggtgtgtgccaccacacctggccgaagttggtgattttgaacagaggaaagatagcacagtgtcataactcagcaaaggtgctcagcagctgcaggagttggggttttctgggctcacacccagcctgtgtccctcatccccttgctccgctgcaagaacccctcaccctgctcagtgctcctggccactgctgactggtgcatggcgagcagaggttttattccatcttactgtgtcagatgtgattccggggacgcagttctttcttaagagctctgatgcatgttctaactaggagggcaggtagctgccgctcccagcagcccctgatgtgttttccttcaagcctggggaacaccgagctagggacacgctggctaatagaggaaggagagctgggtatggtggctcacacctgtaatcccagcactttgggaggccgaggcgggtggatcatctgaggtcagcctgaccaacaaggtgaaaccctgtctctactaaaaataaaaattagctgggcatggtggtgggcgcctgtgatcccatctacttgggaggctgaggcaggagaattgcttgaacctgggagacagaggttgcagtgagccaagattgcaccattgcactccagcctgggcaacaagaaggaaactctgtctcaaaaaaaaagaaggggagcgatcacgtgcatccctctgctgagatgggagcagcagcgtggggttgggctttgaactggcatcgtaggcattttgttttctacatttagaggaaaaatatacatcaaatattcaagtcccctgggcacagataaaagagttttcagatatctctgcagccaaatcccaaatgggatgcagaagggagaactgtgtaaaatcacgctcttccagaagctgggctttgtaatggggctggcaaaaattcccagggcatcgtttgtggcctcaatgtgattttcatgtaagtcatggattttctaaatctttgaggttagtggatctaaagaaaagcttggtaaacatccagatgttgtcaaacatatttaggtcattgttctctgacagttcgtgatattcgttcctactccaggaagctcttaggagaatccaaatccgacttccctgtgctttgagaaggaatgtctgcatgaagaccatcgtacagatggcgatattagaagagttccctcccgtgaatcctgtagaggaaaatgttaccaaataggcctgttcccctgtgcacccaatactaggaagattagataatgtgtagggatttcttggtttttctgcacaaaagctccagggctgctttgaggctgtctgatagacagctgcagtgttgtgtgttacccttgaccgcatccctcctgtccctgagctcgaaggctgaatggtcgatgggagctcctttggtgactccgtagctgtggccagtgcctggcagctagcgagtggccagaactgggagctgctgtgtgtgacgtggctgttcagtgttgtttgtgttggctctgtaaaacgatgcttaatagattggattttaatatatagtttgtttttttgttttttttttcgagacggagtttcactattgttgcccaggctagagtgcagtggcatgatctcagctccctgcaacctctgcctcctgggttcaagcgatttccctacctcagccccccaggtagctgggattacaggtgcacaccaccacgcccagctaattttttttgtatttttataaatataaaaaagatttcaccatgttggccaggctggtctcaaactcctgatctcaggtgatccacctgccttggcctcccaaagtgctgggattacaagcatgagccaccacacttggcctgatttaatatcttaagtcacctttgcctgacacttagcaagaaaaactaccaagaaatatctaatattttccttttgtttgggaataagaatctactcacaatggacacttgctggcttgttttaaaaccaagcttgcttctcactggcctgtttaagtggaaatgaagtctcagtgtggggtccgatgcttcctatggctgcatggaggaaaggagtctgggcctgaatctcccgtgttcctcatgcatgggtagaactaaagcctcttcttctgtaatgtggcagttcccattctcagaggataaagtacgtgtgagtgatgccacctcaacccttagccaggtgcaggcgtaacaagggagacccacctgtgcaatatagtgagacccccatctttaccataaatgaaaaaaacgttagccaagcatggtggctcacgcctgtaatcccagcactttaggaggccaagatgggagaatcatctgaggtgaggcgttcgagaccagcctgggcaacatggcaagaccctcctctctacaaaaaaatttaaaaattagccaggggtggtgacatgtgcctgtggtcccagctattcaggaggcaggaggatcacttgagcccaggagttcaaggctgtagtgagctatgatcttgccactgcactctagcctgtctgtgtggtggtgtgttcatacacaatagacatcgccagtgttctgttggcaggaattgctatcgttggtccttaaggaaaaacacaggaaggatgcaggtgctcagaggaccttctggggtcttttttcctgccagatcaatgttcctgccctacagacagaccatacttgtccttcctccactagcagataagggtcaagtcctcatctcttttacagttccacgtttaaccttcagcttttaaaacgagagaaatagggtccccagtgagttcagctggagtgtcccaggcaaagggatgcgtgcagaattttcagttcctagaagctgagcatcatggcaaatcttagcttagaaaccattctaccatgacattctcagatgagaatttgagtcttatgctaaaaatataaaagtattaataagacgttactgtcttggtaattgcttcttcttacatgtatctgtcagtcaactggctaccagaaaatagcctttgatgtacccacggaggggctcttggtgggctcccggggtgggcatgctcaggcctgggcagtaccagtggttggccagtttctaccatcagcagacgcggttctgctaagatactgcaaacgtgattactggctgtcaggttctgttatttggaaagccagcctgtgtagcagatggctctgctgactggctaccagaagtttcctttaaataaggcttatcagctctagcaacacttggaaatactattctccaggagaatgtttgatttataggtagctagaaatgacccgggacagaggagtcgtgagacggtggccaaagcatctcataaacttggaactaagggagcgaagccagctgctgagggtgatgaatgggggttagctagggctggcacctttcctgaactctcctctgcagtcttcctctctcgcgcagcattagtccctgcagcacggaggcattacccggctgctgtttggttttgaggtagcagtgaaatcaactacatgctttaaaaaaaaaaaaatggtgatatgctccatggcatgaaaaaattcaagaaatggcagtctagtgtttaaaaagccacaggaaaataaagcataatgccacctgaacatatatagtattgtgatttttttttcctcttcaaaaaaggctggtctggctttgtagaaggggatttagattttggagtgacatgtcgggagcatgtgtcttctttgcatcgggagagcccatctctctaaggcagtggggaaaggcaattctctgtgaccaggtttttcagcacccacagttgcacttgacatggcatcattatgactggtgtggaaaataagtgcttccttctgaggtggaaatgctgaaagatcacaaacacactggctatggctggaagaggttccctggaagagtcagtgtcatctaaggtggatggaatggattcttctactccgcagcccgcatctcatatggcaaagtgcaaaacctgggatggattctcaacaaaggtacagtaattgggagacacaaacagtccagtgttttagccctgaaggaatactaccttattttttactttgggctctatgaatgcttcagataacaagccagatagatttacataccttaattatggacaagctactttcatattaaagttcatctcagtatgtgaacattgccctggtctcaaacagtgagaattgacctccccctcccacacctggctaagttaggagcccagggttctggtcccacccttgacagtagcagagatctctatctttccacgttgctgtttgtttctcagcttacagacctgggtgacctttaagtctgtacagctgcagtgataaaattttagacttttgccatattttagtggtgttcatcattaaagaggcgggatggccctgtagctgtctctgggattatcgcgaagcttttctctccctcgctgtctttctgtggtaaaatcacgtagccttagcatttttcgggagttgggtcaattctttgaggacagaacccctgcgttgtcactgtgtagcattgcagtaggtactcaatatatattcgatgaataaatgaaccaatagaaaaccgagtaagtctgtgaaagtttgctaaaaatgctacctggaaatgtcaaggtaacatttacatttgatttgtgtggagttcagtaatattcacatgtttactttggtctttgttatcaacaaagcagaatgctgatgcttactaagacaaaaaaaaaatgagcacaggcagtgtgacccccaaaccccagatttcacccttactgaggagctgtgtagccctggggaggtgccctctgtctccgagcctctgcatctccctaaccagatgggcgctaggctgtcattctgaaccattctgacagatgaatcccgcctggctgctactctagaagttgggggttcttggttcttatcaaagagggcttctttagcctggcgtggtggctcacgcctgtaatcccagcactctgggaggctgaggtgggcagatcatgaggtcaggagttcgagaccagcatgaccaacatggtgaaaccccatctctactaaaaatacaaaaattagccgggactggtggcgcgcacctgtaatcccagctactcaggaggctgagacaggagaatcacttgaacccaggaggtggaggttgcaggagccgagatcgtgccattgagctcccgactgggcaagagcgagtgagcctctgtctcaaaaaaaaaaaaaaaaaaaaaaaaagtcttctttattgaaactcaaaaggtaaaatgattctgtcttggagacccctccttacaatgaggatgtaatcagaggtaccacatccagagcccttagagtttgagtagcaggtaggctgaggtatgaccctgtgatggtgaaaatcatgttaaggtcgaggccacagagggtgctcaggtgtattttaaagtatcctttcaagataaataaagtgaatcacctagcagtcactctgacttatttcattaaatctgaatattaaatttaatgctgtcataaaatctagatttcctaggctataacttctataacttccttcaaaagagagcttgcccaattcagttttatgccacttccagtgtcgtgaacacaataggtacccccacaataagattaaagtagggaaagctggcacctgacaatccctgcctgcaaatagcaaatcccaaagtaatgcttccacctggcctggccgccagcaccttgcccagaaacagcctgtagcaagctgtggcatttctaggcctggagaaggtcgtgtaagcatgtggtgtgattaggggacattgtatttttccttctgaaacttttcatcaaggaaactctgaaacaatacatctgtgtttaagacagcttgaggaactgataagttgatcatctatgtctaaatattgtggcctccgataacatcctagaccagtatctatcagcccaccaggtaggaaatcgaggatttgatggaagagaagttcagttttcattattaatggtgaatatttagcatgtacacagaatgcctggcacataggattttaaccaatttaatcttcacaggaatgctcaaagtttaggagcttttattggcacccctgttttacaggtggaaaagcaagtggtttgtcagtgaataagcctggcttgcgggcaggcacgtctgtctgcttgctcttaaccgcagtattctcctgtctgttgtcatggggagcaagtgcttacctgtaaggaatccttccccacacattggtaaaataaccctacaagattattttagaagttttgcacagaggcagtatcgtagccatggaggtttatctggggtgaggttattgataattgaaaatgaaaacaataaagacagaattatgttaggagacagactgtggcccttcattgggatggcattggtgtacacagcaccctcacagtcacatctctttgttcttgtcttcctggaagcccacttgttcctaggtgaggttggcggtaacaggtaccaaagactgttttttaaacaagtcacatgagttgcatcttcgaggctgcatggttaggaaagatgcctcatttaaacgcgcagcaggtgagacatgcccctcgttttgttcttgcaggccaagccccagagtgggcgtggttttagggtgcaggctggtgctgggctgggcccctcggaggctccggtccgcgctgcgtcgatccatcccggcgcttgggcctgcacgccgccgcgctcgccgccgccgccgccgccgcgctcccgggactcggccagcccggctgggcgcgcggcccgcggtcccttgcacgtcggcccccgtcgcccgccccgccccggcgcgcgtttccattttaaaccgccgcccgccgcccgccacccgccacccttcggccgcagccggtgcagctgtccgcgcgtcccggagcccagggagtggcggaggctgcggaaccgccgagctgtgcagccggagcgggaggatgcgcacgggccccgcgtcgtagacaatgaagccgcgggcgccgccgcctgccctgggccctgcgcaccgcggccgcacctgccggcgagagcgctctagcgcctgaccggccgcctcgcttggccccgccggcccatggctcggcgccccgggcccggaccccggcactcgggcggcgcggcgcacgggccggcgggtgccaggggcgccgtccccgcagcctgagtgcggccctcgcggtcagcggggggcgtgggccacactcccggcccgcctgccctccccgcttggcccggcgccctcccggcccgcgggctcgctggatgcggcggggccccagcgcgcgggcgacatgtacttgttggacggcagtggcgagcccgcgtcgccacccgcggacgcgatgccgcgcgggacgccccccagaaagactgtctaccgcatctccgtgaccatggtcaggaaggagcagctggccgcgccgggctccggcggcccggacccacgcccggttcggcggccccggcccgcgcgctccccggacgcgcccgggaggcttgaggaggaggccgaggaggcggagggcgccgaggaaccggagggtccccggccgcgcgcttgggatttccgcaccttccgcacccgcagcaccgggcagctggaactggggcggctccggccgtgcgcacgcggcctggaacccgcggacctggccggcagcgccccggccgaggaggagggacgcggctcgcccgcgtccggcagccccgacgtggagggggcccgggccgcgcccctgcggcggagcctgagcttcaggcactggagcgggcctgaggcgccgcaaggccggacactgggcggcggaaggcgccacagcagctccgggagcctggcctgggcgccgtgcgacgaggccgcggccgggaccaccctggagcccgcgaccgccacgcagcccgcctcggagaagcgcaacaccctggacgtgggcgaggtgctcagcaagaacgacgcgctctcggacctggagcgttgggaacgcagtaagagcaagaaccgcacgctggacaacagcgacctgcagcggctggagcgcgcgcgggcggcggccggggccggcgcggcctcggagcaccggctgctgcgcttcttcagcggcatcttcgcgcgcagggacgggggcccgggcggcgggccctcgccacggagcggagcctcgcggccacgcggctacttcagcctgcggcgggccccggccgaagcgcactcgtccagcgccgagagcatcgacggctccccgcgcagaggtgggcagcgtggccgggggtcccgggacgggaaggggcgtggtggggacttgccggttccgcagcggctatgggacccgccctcccgggtcgggagcctgcacgtggcctcgagggatgcgaactcgggtactgcggttttccccagcagggcgcagcggtcctgggttttctggctgcccctgcgcctggctgtgcgtgctggtgcccctcggagtccaccaccttcatcaaggagagcttgacccgggagaggtcgccttgccagccggcgccgacctccttcgcgtgctcgctgggtcttctgcgggagcgggccctgagctggctgcccgcgacacctgtggggccgccccagggagccgaggctcgccggtcgccgccgcacaggtgcggctgcctggatgggagaagccggcattcatcctggcgcccctccctgcctcgagtcgtctccctgttagtgctaccatctgtcagtgttgtgatgtggactcagctgactccgtggccctcggtattgagctggctgtaaggacacctcactacagtggtggggcctggggtgggacggaggcccctctctccacagctttcctgccaggtggcatcttaatgaggagagcgagtctgggactggattctgtttcctcataatgtaggctagcaaaagggcaggaaaaccgcagccctgcagcctgttctgaaacctcaggtctgtgttcccttaagtcctcagacagggactttgcatggagggatctccagccagatatgttattctctgcaggaatcagttaaccttttggtagcatttcggggtcagagcctccagaaacctcaaaacacagactccatcaactgcgcatcaccctgagggggattctgggggtggaagtggtgctagattgctacaccttattctcctgggagggggttgtatgcctgaagatattgtggccacagacaagaggccatgcatttttaccaccaaaaaaaaaaatattattcatcctcttatctgaattctttaacttggctggtacagataaaggtagttggagagtgggcttttgatttgcagttcagactgctgtgtaacccacctctggagagggtattcatcccaagtggacttaacaggtcagctgactgcccctagggtttatgttaaaaccaactcatgcaaataaatgactgtccttatggaaatatttttaaggtaaagtgaagataaaatggtcatgttctaatatgctcctaatgatcctcagaatgtgctagaggatggttgaaaccaagcagtggcatgtgcggtaatgttaaaatctgacctgtttcactagtgaggctacactgttgccacacttatgtttagcttgtcatggcacatctagttttaacctcccttggagcacttactttagaaggcactgtatttaactccaaccattatcccatcccttcatgtattctcttaaaatatgagaacatgatgcgtgttattttgttaaaagaattggtttgcacgaagttgctcctgtcatcattggctttcagaggaagttaagacctgaaggtctcagttctctaatagcaggcttgcatctttgctctgtggacttggaagaaaacagtaattagctgcctcggttccagacaagtttgtatcagagagagaaagaaaaacgcacagacatgatttagagagaatgcatttcattgtggtccctcttgatacaagttaaaagcatttggagtttggatagttcctctctggtcaaatggattgatagtagatttggagtagtaagggtgtgaagtgtgttggaatgtttatagtaatgctcagtttgttccttgtggtcagtccttctctgggcggaattactttggtctgagacatgatattaccagcattgtgggttgtatagaaaaacggaaatttaatgaactacattatagccatatggtcagaactctagggcctcacttttttctgaagttctaagtaatcacatgctcaaaaaagctacatctttcacctggataaattctttgcctttggctaaaatgtctgacatgtcaatattcttaggattttggtgatgccagtgtctgttacaggtaaaaggtgtagcccccataggtgtcacaacttctcattttattacatttttccagtctttacatatttgcttcctgtgacataaattattcagaatttaggtgctgtttaagattttgaatttaggtgagaatctctaaggtaacagtcagatacagtagagcccaagctcagtttccctgtaaatgtccataggatgcaagtccccaaaccactggggacaggtgggtttgtaggactcggaaattttggatctgaggaaggtaaaatggtgtgtgttatatagaacgctgcttgtgagatcgggtggcgccctttagtaacacactagtattttgcagcaaagcctgaaatatccatactcagtgaaataaatagtgattaaaaatagcctcgtgccagttagagtctggttttgccaccaaagtaatttgccagccatttatgaaaagaagttccattctcagacctttttggatttcagattgacagctaaactatcgtagacctgcaacgtgataagcatcatgagaagcaccactggctttctgtacattttggccataatgttttaaaatttggagtccttgaaaatataaaggaaattagaagtgacctcagctggtacaggtttttcttccgttagaatcttttcatattctttaaaagagctagtaaatttttgaattggctacagaaatctaaagactaagtaattattgcattagtctatttggcttagagttaattgcttaggcaaggtatttccattagcacagggaagcaagatggctggagtcttattttaaagcacacacaggctcctacatacgtgtacctttggtttgcctgtattctgaactgaaggcattaaggatgaaaggattggagcacctaccttttgtaggatgattctcttgtactgtctggtccttgttggaacttgtctatttaggctcttcctagttcttccctctaatgcagaacagttgcctcggtgagttcagggctgctccctctgtgtaaggcttgcaactgatagcagcaagccagcagacattccagaaagaccctgtgtcagatcaagggcagtttcgtgttaactgatacacatgtgttagggcagagtccgttgactcaagtataatttaatacaaggaaagatcaaataataaatgataaatgacattgtagggggtccccttgcagcgcatgctctctgcatcccagtggatgccgtctgggccggccctggaaccagctgtgctgtgagtgaagcccacactggctatgcccatccagaacattcggtgtctttagagtgttctcttgctgtctgggaggattgattacagtaataaagtgattcattgatacctcttactgaggttagcttttaaaattagtaatttacaactgatttttgacagcacattttatgagtggctttgttctttaatttctgattcccttgatttgtatcagtcaattactgtagggtgatagactttttttttttttttttgatggagtctcactctgttgccaggctggagtgcagtgagcgatctcagctcactgcaacctccccctcccaggttcaagcaattctcctccctcagcctccccagtagctgggactagaggcgcatgccaccgcacccagctaatttttgtgtttttagtagagagagggtttcaccatgttggccaggatggtctccatctcttgacctcttgatccacccccctcggtctgggattacaggcatgagccaccacacctgtggtttttttattttattattttattatttttattttttaaaccatttatatttttattttttaaaccatttaaaacaaacagccttcagtggagaacgtgaggacacagcaattaaatgaaataaaattactgaaacaatttgataaagtttgatttttaaatttgatttgttactgaaaaggacactttttgttggttggttggttggttggttggtttttttttttttttttgagacagagtctcgctctgtcgcccaggctggagtgcagtggcgcgatctcagctcactgcaacctctgcctcccgggttcatgccatgctcctgcctcagcctctccgaatagctgggactacaggtgcccgccaccacgcccggctaatttatttgtatttttagtagagacggggtttcactgtggtctcaatctcctgacctcgtgatacacccgcctcagcctcccaaggtgctgggattacaagcctgagcgaccgcgcctggcctgaaaaggacactagtaaggaaactatgtaattcagtgtttctcatttgaaacattttgaactgattagtcttttgttattagaattgattatctacagtgttttgttgttacaattgaacattcctagagtttgcttgctttttgtaaattactccagatagcaatttaggaaactcctcattatttttgtttagggctaaaatgattctcctggagacagagcagttgtacttggggtacaaggaagagctgtgctgaacgtcagccagggaaccttctaagtcaccgctgtgggctgtgtcctgctgtttatttccttaggttggagcccaagtttcagcataggtcacctgttaacatctttctctttgataagtcatcaaagagacttgggctggaatatcctgccaccagggggaatgttcaaaagtacatctgctccagaggtcctccagtgttgacaggcacattgtagcaaattattgggttatacagttaacaaataccttttgtttggagctgtaagacccaattataaagcactagtagtttttgtctttttaatgcattaacaaacatatattgcatgtttatggtgtgttctgcattcactaggcagtggaagctggagctaactagagcacagttcctgtcttcagaggtcagtagcatactggaggagatggaaaagattgaatgaatcacagcctcatggggtacttgagggatgatatgactatttctctgcatagcatatctccattagagcactagtccactgtgtaacaataaccttgcatacatgcctgccacttctaactagtgagtccttcctgggcatgaagcacgtatcattcctctgtgtactgcagagttgtagacactgtgcttgacacatagattttagtaaatgtttatgggtggaactaatgagagaactagaagagggagtgaattgaatgttcttgagttaatgggaaggagttaatgaaggcctcacagaggggcaaatgagctggatcttgtaggatctgtaggagtttaccaggtagagaagagtgactccaccagcaaggtgtttgggatttctatagttaattgttaagaatttattcctgttccccagatccttatgactaatgccaacactaaacataaaacaggatgttactctttctacaatgagctttggtgtttttgtttttgaaaaatattttcggtatatggtttttgtttctgataggaattctcctttaggctattgtcaatttgttttcctgtaatgatttgaaacaattatattaacttaaaatgatgtcacaatgagtgaaataatgaaaaaaagttatagttattgagggtagtctcatgatgagataaagtgcatacagctgcactcatgtcgccaggtgattaagaacagaattggtattaaggtcaacggattagcaaaaagggaggagattattgtcttttcattattttgaaagaagtaccatctgcccttgattgttttggtttaggttttattcagcccaaattagaatccgctgtggtgttgattgttccttgttggtgatagccctagaactgtgtttcccatcgttgatacttgcattcacgtttgctagttctctcttctcctgtgaagacatgaacgtagctgctcctttaattacatttagctagttttaattcagagatggctattggccctttgttttcttaccatcttttattgtgttcattttcctagttgatttttaatggtgacatcactaacagctctaaagactcaaagcttaccagacagcacgcttccctgggtcagaagatgagagtcctctcctctctcattcagtaccagggtgtaccagtgagaggcttgtgaagggattgtttcggcgactccttatctaagaaatgaagataatttttatgaggtgcattttggtctgtgggagtggaagggaaaatgacggtttctttcctatactgtcctttgtttggaatggtgaaaatgttttgaatctgtttctggtgtgatcgttaggtccaagatttcacgtgacgttgtgtgccgggtgttgtggtcaacacacaggaatgctcctttattctctgtacggcctttgggtgcatcatttgagtggatgttcatttgcttgagacgattgtcagagggaatcttgtgtgccctttgctctctgtgcctgtcattgcgagggtttctttgagccggtctgctgaccgtcaggcacttgagattgactcggtgaacaatgccgccagcctttctgatgcggctcctgccctctctgactcctacacaggatcagaatcactcagatatcacttctgttggtggaggcgagagaagaatatttatccagtttctgcctttctgcccccattagctctttaccaaaaaaaaaaaaaaaaaaaaaaaaaaaaaaaaaaaaaaaaaaaaaaaaaaagcaaaaccagttattctgtgaaaatatgcaaagcagagttttggccttgaggatgcgtatttgtgacttgctttcctgtacagtaagtgctgccgcctcaggagcgggcgcagtcgcttatggtgccggtgagcctgcgcggcgctggcttttgctcctctggtgccaatgcagctcgttgacagctccaagatatttggatatctcactcttccggctatttcagctgccaaactagaatcccaaccttctgagagtctgttctcttttggatttgttcatagatgtctattctctcctgatctggttcatgaacactctggaagccaagttcattgaagacactctggatgtgtaatttggaagaggagactggagcatggaggctttgttcctagtattagagaaacacatagaaaggacacagtgtctagcgctggttaaggaaacttaaaggaaaaagattggggctcagaattaggaagtaatttctcacaagcatagccattctgctttggaagaagctggcttctcctatcactggaggcacccagactcgggctggcgagggattgttaggacgggggctgtgtgtgttgttgctggtagaattgatggacttcaagtcccatcctagttttcaaggtctagagtcctttcaggatctaggatttgatttttgtacctggtcttctctcagggggtagttttctcccaggcttaaaggaagatatttgtctggagtttctttggactgtcctcctgcctgcctgcctccctcccgcccccaccttgggatcctggtatattctgccggctcacctgagacgtagtaagagttctgcctgtcagctgcaaggtgctgggtggaaggtccctgcttcccactcccgctctcctgcctgccagccccacagtagtgctgcctgggcttgtgtttcgccatgtagcccctctcgataccgatgccatttgtcttctgggcatccagatggtgagtggtggctgggcatgatcttaatcggattctccctgtgcacagccagccttgactcgaaaactgatttcaggtgtgtggataatacaatgatggcggcaagaaagaaagaatgcttttctgttggttgttggaacacatttaaattgccacatggagaaagcacagtgtcttgatttggtggagtggatttagtcttgacaacaatacttcggttagtaaggtgattctgcctagttatctacatccctgagctctgtctaccttgtgccagtaaacagatatgtcactgtgcagcccagcaccatatctttgctttactttatttagctgtaatacgggttttgcaaaagacctaaaaatagaaatattgcatatgtggctgtgtttgcatttatagttactatgagatatacatttgcccaggtggatttcttatatcccgaagctccaagtataagccaaccttgtattttgctttcactgttttcccctgtattttctcatgatcttcaatttaactacttcctttaaaattattgaccactgttaccttaaaattataaatggggagaatagagttctctttttttcctttggcttaatccccttcccactcctcttattcggaggagtagcgattacttggcagcatatggattcgtctcattcctggtacaagccaaatatgtgtttattttggacagctagtctgagtgctgcgtcccaacatcacctttcctaatccctgctgtgccttctcctggagggctggcaccagagagcattgcctggaaagcagagtaatctgtgctcttgagattttagagaataaggatggatattccttgttgggcgtgacttttagtcttcagagtaagaaagcactgacacagtatattgatcaggtttgttcagtggagtgtagtaaaggtcatttggtgaattccgtattttcaaatatttaggtttctaatatgatgcgaatggtgttacgtggatctgtgttgtactgacgctgacattttgactgtcgtttctaagtaacgtactactactttggataaaaagcaccgtggcttaaccattgaagataatgttacaaacttagatagtggttgagctagcaagtaactagtgagaggaactttagctctatatgcaggagatcagagcacagggagctggccccctggctgaccttccttgtgggctacccacgccttgcaactgaagagcggtaattaaatatatattcatagaagagtggtaaaatctgctttgtccgtggaaatgagctaaaatattaagaattcaaggatgttgggccaggatttgggctttaatttggcgcgggagaagtgttgggcctgagcccttgtaggggtgggacagggcaggggtttgagtgtgaatgctggtgtccagaggggtcaggggccctgcagccccctctagaagctgtgacttgggaagcaccctcgtgtccatttggacccgtctcaggtgacttgatgtgtgtgatccccccatctctgttctgtggctctctatgggcctggggaaggggtcccaggcatcctcttgaagccatgtggggaggcaccgagagcaggaggctggcttctcctggtgtcttgtccttggcagggagcaagtgacatccattttgactggtgctgacagggtgaatgtactagcataggtgtgtgcagctggggctgtacctgccaggagcatcctggcgcgggtctcctgcctgagcttctccttgttgggaatgctgtccttaggcagatcctcattttcaggcctcaccagaattgcctggcctggtgggaagagagtggctgcgggctcccagaggttcagctcagagttctactccacacttcctgggccagcttccgcctctgaacacctgagctgacactgggactgtgaacccagataagatgatcatgctcacagctgcagctcaggatgcagccagctgtgtttttcctacttcctctcagctgggcagtttgctggcctctgaaaattctagccccccctcccccttttctttttaggcagagtgtcgctctgtcgcccaggctggagtgcagtggcgccatctcggctcactgcaagctccgcctcccaggttcacaccgttctcctgcctcagcctcctgagtagctgggaatacaggtgcccaccaccatgcccagctaatttttttgtatttttagtagagacggggcttcaccgtgttagccaggatggtctcgatctcctgatctcatgatctgccctcctcggcctcccaaagtgctgggattacaggcgtgagccaccatgcccggcaattttagcccttttgacacactctatgacccttcttacgcgcctcccgaggaggaagcatgcactagagcgtgactacaaacctggtgccatgctagagcgggagaggagtgactgcaaacctaggcctctgtcctgtcacctttcctccagctggtgaaccaccttgtctactcccttgccccaacacagccgacaggtggacagccagacacatgcagagccattgttttttcaaagacctgttaaagtttaaaggctttgttcactcattcttgagactaacagttcaagttcacaagaataaatgtggaatacagtatgcacctaaaaatataatacagttttaattttcatctgtactgttagcattaaccagcacttactgaataatgtcctcttaggactctgtgttaattgactttttaaggttgattgttaatagagcagtaggttgggaattacagtattggtgaaatttaactgtttttcacgtgtgtatacctaagtcctataaagggtctaatttagtttgctttttttttttttttttttttttttgatacagagtctcactccgtcacgcaggctggagtgcagtggcacaatctcagctcactgcaccctctgcctcccaggttcaagcaattctctgcctcagcctcccaagtagctgggattacaggcatccgccaccacgcccagctaattttttttgtatttttagtagagacagggtttcaccatgttggccaggctggtctcgaactcctgaccttgtgatccacgcatcttggcctcccaaagtgctgggattacaggcgtgagccaccgtgcttggcctcggtttgcatattttatactgtgttatgaaaccgtatcagcactgttttttttgtttgttttaatatagaaataatatgtacgttgtggactcctcctttcaagctgggcatatttcattttcactctgaactagcttggtggccaagaatgaggcgtctggaaccaggatcctgttttgtgggggttttgttttgttttgttttgtttgagatggagtctcactctgttgcccaggctggagtgcagtggtgcactctcggctcactgcagcctctgcctcccgggttcaagagattctcctgcctcagcctctcgagtagctgggattacaggtgtctgccaccatgcctggttaatttttttttaattttagtagagatggggttttgccatgttggccaggctggtcttgaactgctgacctcaaatgatcctcgcaccttagcctcccaaagtgctgggattataggcctgatccaccatgcctggcacagaaccctgattttgcttctagatttgtgacctttagcaagttatttaacttgtttgtgcctcagttttctcacccgaaaaactaggactgacaatggcatttaacctgctgggcactggtgagtgaactcgatgtgtgggtgtgtgcacacgtgtgtgtgtgtgtgtgtgtgttttcaggcagcacgagcacggaattcatgttccggtctgttgccagctgctgtagttcttttgttgatggactcatctcaccccctccaacacagggaatgttctggaaggaagtgtggctaccctgccatggttctgtgtctatgggaaatcttattctcctggaaaacgcaaagtaaattcttccctttaagacagaactgagggccggtgcggtggcttaattcctgtaatcccagcactttgggaggccgaggtgggcagatcacttgaggccaggagttcgagaccacctggtcaacatggtgaaacccccatctctactaaaaatataaaaattagctggacatggtggcacacacttgtaatcccagctactggggggctgaggcaggagaatcacctgaattcgggaggcagatgttgcagtgagctgagatcgcaccactgcactccagcctgggcaacagagtgagactccatctcaaacaacaacaaaaaagacagaattggtaaaaatactgatcccttggaaagaagtaactattttagataccattgttttattaaaaatgtacttgcctccctcatatacacatattgatataatgccatctacatttgtataatttataaatattatacaatacttaatacatattatatttaatattaataaattatacaaataaaacttatagattataaaataagtttagttattttaatatttaaatgtgctaaatgtaagtttgtaaaatttaggaataacttgttagaaaggtgaagaagctctggattgaaaggtatgtgctgaggtcaggagtccagcttgctctcctttgaggagatggccttgttttttctttctctctctctctttttttttttattatattttaagttctagggttacaggtgcacaacatgtaggtttgttacataggtatacatgtgccatgttggcttgctgcacccatcaactcgtcatttacattaggtaattctcctaatgccatccctcccaagccccccgtcccccgcccggccccagtgtgtgatgttccccgccctgtgtccatgtcttctcatttttcacctcccacctatgagtgagaacacatggtgtgtttggttttctgtccttgtgatagttttgctgagaatgatggtttccagcttcatccacgtccctgcagaggacatgaactcatcctttttttgtttgtttgtttgttttgagatggagtcttgctctgtcgcccaggctggaatgcagtcgcacgatctcggctcactgcaagctccgcttcccgggttcacaccattctcctgcctcagcctcccaagtagctgagactacaggtggccgccaccacgcctggctaattttttgtattttgtttagtagagacagggtttcaccatgttagccaggatggtctcgatctcctgacctcatgatccacccgcctcggcctcccaaagtgctgggattacaggtgtgaaccaccgcacctggccacagcctttcttaaggcaatcacgagacccagcccatcgtggcctggtgaaggagcaagccctaggcttcattctcagtttggaaaaaaccgtcattgcccagaatgtcccatttacacattaattcctaaatggaatgatgggagcgctgggtgctcagaggcttccttttgaggatttgccagctgcttctggactgtaacttttgcagcaacttctgcactcattcatcaggtgcagagcagtgtcttagaaatgagtgagtcttagtgatttcttggagtgtggatccatacacacttacctcttttctgaactatagatgggaagctgctgcaaaaaagcaaggtgcagcccctttcttgtatgagggaagctactgtttaccatccatggctgcttgagtttttagagctgcgtcagatgaataacttgttggtatcactcgtcaatcttagaggcactttcagagattaggaattgtgaccaacaggagagactatctggcattaggaacaccagggcctattttggatcatgctgtactgcttacggtcatgccctgtccaatctgggatgactgtggcatacaagtcaccatggccattgtgaagcccttgttcttggagaccctgtgctccaggtgtggctggttggttccctgtggcaggacccccagaggccccaggggttgtgagagtcaggggtgtgcaggttctgagggctttgctgggtgggccgaggttgagtgggctggttgcagaatcctggtgcccagagggttcttctttgcctgttgctggggactcacgccttgtgaggggacctttctttattaccctgatgaggacagaagagttcctgagaggaagccacaagccgcctccctgacctggcagctgcctgtgtgccctggtgtgtgggttcctcccttcctgggttcatgcagcagactcttggcagtgcaggcctccttccaggggctctcagggctcagttctcatctctctgggtcacactgagccctgctgatccccctcctgtgtggctgcctctctgatgcctgaaacaccttcagctgttagtcccacggcctctcatcacctcgatatccttttctgcttgctttctggttttcagtggctgccagcagaggctgtaatgctcccctgggacctgaccagtagagaacaaatgctatgaagaccagaggcccctcactgctccacgcgtatacagggtgcgtctgtctggacagccgaaggcccatgggtggttttgttttcaaaacacaatgaaaaatgactagtcatgccatattgttagcacctttcgattttttttactgtaaaaatcaaaacagaaatatttggctccagagctctgtgaaccccgaaaatttgagacgggtctcagttaatcttgaaagtttactttgccaaggttgaggatgtgcgctcattaacacagcctcaggagatctaacaacatgtgcccgaggtggcctgagcacagcttggtacgttttagggagacatgagacaccaatcaatacatgtaaaataaacattggttaggtccagaaaggcaggaccactcaaagtggggagggggcttctgacattcttttgagtttctgatgagcctttccaaaggaggcaatcagatatgcacttagtgagcagggcgatgactttgaatagagtgggaggcaggtttgtcctgagcattttccagcttgaattttccctttagcttagtgattttgggggcctaagatttttgttttccacaggtctttttaggaattttaaagatgtatctcatccagtaaagctgaagtccccccaagtggtagctgaccatagactaagcctcctgctgtacggggcacccgctgggagggaagaggtgctggccaaggtgaatagatggtcagatgggcgataggaatgaacactttgccatggtggatgtgctttagtgatagaatttgttcaggagattatctttgttcctggtttgggaaggcagagcttctatattggaattctttgtctcccagaataaaaactctaacatcacctgtattatattgtggggattaaaatcatgcacttgtagccaaacctaggtatgagtgtgagcgtacactgctgacagattgaaatttgacgtccgaattctggttcccaggaaggagatatatatatacacacacacacacacacacacacacacacacgtgtgtgtgtatatatatacgtggagatatagatatatatatatatatatatatatagatatatatatatatatatatttttttttttttttagacagagtcttgctctgaagcccaggatggagcgcagtggcgtgatcatggttcacaacagccatgggcttaagcagtcttcccaccttagccacccaagtagctgagactacagacacatgccatcatgcccagctaattaaaataatttttttttttttttgtagagatgaggtcttactgtgctgcccaggctggtctcagacccttgagcttaagtgaacctcctgtctctgcctcccaaatgttgggattatgggcctgagccactgggcttggcttaggaaggctttttgaataattatcttcctcactcttctttccacccactctccattcaaccctgatgaaccctgctggacttcattacatttctgctcacttgacatgcagattgcagatcaggtgggcgggagctgataacattctcacttggcctcagtttcctcgtatgtccaatgaagggatgcaccctagctctaaaagtaaacattgttctcaacagaagaatctgggcatttgctatcaaacagattcccattcttcaggcagttaattttccacaccacaggagatgtttgtgacatttcccatttctttgaagtctaaagtagatattgatcctttggaaggagattaagttctccggttccatcaggtgtaatgatttcagttttagtgttcctaggtggggagtgctaacccaaacctttcatatgtaggaatgtcatccctctgcagacctttgagtccagatttcatttgtagttgacctttgggggtgacagtccgatatgtgtaaatcgtaatagcccttcatcgtagataccagtttaaaattcattttaggtgagtttccaaacagatatattggatgtatatcagtttaatttgataaacatgcagataaaaacttattacatgaggaccagtgtttgaaagatggcttacatgacctgatgagttttcattttgtccgtttccaaaatacacaggaatgcaggaatgccaccttcgttcagatcagacttatcttcttcgcaggatgtggccagagatttatttaagacattagctgtgatgaggaaggtcagataatttaagcaggggcaaagtacacattactgaggattcagcgctctttggtagaaggatgtgttcctggattttttttttcttttttttttggatttttcttcttaatcgccgctctctgacttttttttttttttttttttgagatggagtctcactctgtcacccaggctggagtgcagtggcgccatcttggctcactgcaacctccgcctcctgggttcacgccattctcccgcctcagcctccagagtagctgggattacaggcacgcaccaccatacccagctaatttttgtattttcagtagagacggggtttcaccatgctggccaggctggtctcaaagtcccaaccttgatcaagtgatctgcccacctcggtctcccaaagtgctgggattacaggcgtgagccaccacgcccagccttgccctcggatcttgaacctcctgtctactcttgctgggctgtagatggacagaggtgtcagtattttaggagtgtgatctctccttttgctcattggtgtttgaggtctgtggtgtctgtttggggagcaggtgtgtgcaggaaggaatctgcactctccacttttgctttcccaacattgtttttttcattctctctggaaggtcatgacggtcccctccactcactcacctctcacatttccagcccctctacttcagacagacttccgaaactttctgcctctcttggggtactttagtatgccctgcagatgtaagctgctttcagaaaaagccagatcctgccacatgagactgcaggccctactagaatctgttctatcccacatctccagttataggtgggtgggaagtgggaattggaattttttccttttgttcagattttcgtcatgaccacgtgtgtacccgttaagactagacaagggagtcaccgctgctgaaagaaaagtcattgtgtattcattttgcattggaggaaatgagcattggggtgctttggtgacagcttggaggagcaggggagtcagtggcatgactaggcctgggtcccctcatcccgcccctcattcacccgctagtgctgtttgagggccagaaccaactgtgcctgtgtttagactgggtttgttgctgtgtcacagtaacgcaattgcagcagcagcagccgcacccgtgtaacgttcgccaagctgggtactgttggaagcactttgcttgcatttgtgcagcgattccagcaacaaccctgtgcggtagattattgtcccataaatctataagattgattgattggttatctgtaggagacatctacgtatacgtatttatagagcaatgaagaaataagcccaaggctatcccatgagttaggggcttcagggcttctgcgctttgctggcccttgtgctgccttcggtagatggccccggccctgcctatgccttggacactcttcattcgctagcaccgagatggttcagggcactttggagctagagcaagagcaatggagagagtgaggttgccgtgtccacaagtcactgcacagctcaccacgcgggcctggagtgagcctgctgctgttcatcggcccgtagggtctccagcacaataccgggttagtgagcagaaagtagtgcactgattatgtttccattacaccatagaacataacaattttgactgcagagaggcaggcagaatagcttgtccaggaaaataatagtgcgtttgtaagccagagaaagatggtactgtgtggtggggaattctgaaagtcttaagtctgtttctcaactcccctcttgttttcattgtttcaggcaaataatttctgatggacaccaaattggcaggtcaccatagggacctcccctaacctcaaatctgtgtaatgaagtatctgcaacatttccactcatttgagagttccacttttcaggacagtcatagagctgcactgttggtaaactgtcctgcatgtgtgtacgtgcacacttgtgtgacgtgtcagctcgtgcctgcagagactctgccagcagggctgaggctgctgccaggagagcatctggggtggtgtcctacacctcctttccaggagtttctgtgtgcatgatgcacttcagaacctatagtgtcatttgtggtatttttttttttaaatactgcttttgtttattttccctggtctaattttttcagatggtaaatagatcgcgttgttgcatgcgtttgatgaaagtgatatcacagcaaatgcaaaggtgactgggagttctaagcccctgggtgtctctccctcggggttttcatgcagtattgacactctcttctccccaggtgctgagtccccaggttcccctctccccctacctgaggtactgagggatctcacttgctacctgcttggagccagtccagtggcttcacttttaccactcagagaactttagtacacagtcttaaacaaccctggaatgttgagctaaaagggactctgaccctccctccgcaccccaccctttaaaggtgaaagcagcaggtggggtggactcctggggctggggaggccgtgccctgggggcaggtgcaggagggagcctggctcttcaggttaaattgtgtttcaaaggcagagctcacattggagcacttgatattatgcatttgaaacattgagacacagcttctagtttaaaataaaggtgatagccaaggaggaaagcatggtttattcctagcttccggtagaggaggctggccaactcagacacctaagcagccacatcagacccagagtccgaggtagaatggatattgctaaagctgagagctacagcagagcgtctgcttgaggagctctgacgggctgggcagccagtgctcctggccctgaatgtgtttgaaggagctctttggaaagaggtgcaggcttccggctattggtagacacctgtctgcttggggcaggtatactgactttttgttgcttttacggttatcttcgggtaaagtcattgtgtttcttcttgatttatttatttttttctccagtctagtcatagtattggtttcgagaagtcaaaatcaatgttttattttcagagttctaaatccagccatataaatacttcggatctggcctgagggtttggcagggattcgtggctgctattttagatatgccaggagccttcttggaagtcgctcaccacctggttttctccaattaggctatgagcctgtatcttagaacactcagattagtgtgcctagagtgccaaggtgggggttgtagacaagattctaccccctcctccagactctgctccctaggccgaggtgaggccagcaaggagtctgccccatgcgattctgaggccttggtcccttctgagagaccccagccccgagaggctctgggctgctggatgctggtgccttttcccaccgtcaatcaagcacatgcgcatagggctctgtgcctggccccaggactgtcatatccagggaaaggtcactctctggcagtggatgctaccctgttggtggcaagttagaaaggcacacgttggtaatggccaatggttgccagtgccttacttttggagacaggaattgttacacgtctccgttgcgagaagcaaaagtagatttaacacatctttaaaatccgctgaagactgtaaagatactcatttgagatgtgccaacatttagtcggattctgtgactggtcgtgagtccctcttcctccacacagcaacactggttctaaaacagtcggatagccgtggtcatttgtggatgtgagcacagccaggtcccatgttgacaagtgctggacagtggacaccagcgggagactcagtacaaatcatgttgctttgggcttatgcacatctgcagaaggctgcaagctggggaactgaggggcctcttggtctggggaccacgcctcccttcccttccttccctgtcctgagtgtgacctccgtcatgttgacccctgcactcctgcccgccccccattcacccactaggagaaagtactggatagggatgagcttggggacaatggccagtgacatccaggagagggaacttagaggcaaggcagggatgcaaaatcggagttcctagtagaaacagacatgcagcatattgtgaaatgtttcagagaaataacagcatcacgatagcacattctctagttgctggttatctagttactagtggtaagacagagccagttaacaaagactataaagttttctcaagaggatgtaaaccaagtaaacaaaataaattcagaccccaagtgcgcatattgagtttgaatattcatctaagaagcttttgtacatgcgttatgtatccataagccaaagccgggggctccctggcagatgcccctacctggccaggtctcgtcgtgtctaggtggtgacagccatgtagatatgcccgctgccttgcacctgttcctctggcctcgcctctgtaacagaacgtggcccctgccttccatcttccccagggtgccagtggggaccttgccttctccagcactgggccgtccactttgctcctttgtgcctgcactgccaggtgcacatcgagcctaatctggcttaggaaacaggaggggcaccagctagaaaatgtgacccatgttgccaactcccaaaagccaccaggtgacttccactgccgttagaatgaaacccaaactctgcactccagccccagcatcaaaccatacttcgccctgctgcccctatgctctccccccttgccctccccccttgccttcctgggccatccttttctgactcagcctcagtgcctagccagtgggttcccctcgctgaccctcagccctcaggcccagcacctcagagaagccgatgactgacgtgcaccccgccagcctccctgcttatccttccctgccgcctcgtgtgtcctgcatggcatttgttacagcccgcagtcacaggtcttgcggtggacttgctggtcggctgctctgctgattctcgaaggcggagtcagggtgtgcttggtgtgcgtatctcccttgatgtggcactgcctggctccggagatagcgagggagggagggaggcagtgagcaggacctgttgctgtcggtggtggcatcagtggagttggcaggtactgtgcatgggagagggagtgtggcctgcaggccagtggctgaggcccagtgtggactgtagagtgtcagattccacttgctggcctaggggccttcctgatgtgggctgcggcagtcaccactggggaaggccatgcagaggctgactccttgggaaggaggctctggaaggagagcatgtgcagaatgtttcctgcagtgcctcttgagctcccgcctgagggtttgctcagccggcaggcctagaggagggggctttggggctgcagtgcagtctttgcaaagggttcaagggtcctgaaggtggtggcactgtggccttaggagctggggtagtactcaaagctatccccaagtaggcacgggggctgggcctttatgcctgtcaccagtctatgattggacgtgttctgccctccaggggtcatatccttgggccacaccactcacttctctgcccaagtgcagtctctggcatggggactcagcctagagtgatcagccacctgcactcccagcagccaggtactgaaggctttacccctgaacagagggacaggctggtgcccaccacagtcatgcgaaggcattgcggaaagctctcattaaaagagcattaagccaggcctggtggctcacggctgtagtcctaggtactcgaagctgcggcgggaggatcacgagctcaggagttcgagtgcagcctgggcaacatagtgaggcctcgtctccaaaaaaccccacaaaacattagaagtagtagtacttgctattctcataggaggatgtagaaattagataagagttaactgagaatagatttgaattagcttttattcccactgaaaaaatcagaaataaacttgatttcctctggcataagtgtgggtcctgtgagttgatcctcagcccttacttgggggttaatgacgttcccatttgaaaaacatggcagtttcaatgtctgttaatgttgcaaagcataccaggaacattttataaaaagtaacagaaactaccatgtgattctggaagctgcatagttaactgtccatttatcttgaagtctagtgattcaaagcatgaggaataagatcgggaagctggccagatgtggtggcttacacctgtaatcctagcactttgggaggctgaggtgggtggatcatctgaggtcaggaattcaagaccagcctggccaacatggtgaaaccccgcctctactaaaaatacaaaaatttggccaggcatggtggctcacacttgtaatcccagcactttaggaggccgaggcgggcggatcatggggtcaggagatcgagaccatcctggctatcatggtgaaaccccgtctctactaaaaatacaaaaagttagctgggcgtggtggcgggcgcatgtattcccagctacttgggaggctgaggcagaagaatggcgtgaacacgggaggcagagcttgcagatagccgagatcgcaccactgcactccagcctgggcgacagagcgagactctgtctcaaaaaaaaaaaaaaaaaaaattagctgggcatggtggcagtgccctgtaatcacagctcctcgggaggctgaggcaagagaattgctttaacctgggaggtggaggttgcagtcagccgagatcgcgccactgcactccagcctctgcaatagaacgagactccgcctcagggagaaaaaaaaaaagaaaaaaaggaagctgctaccttcccaaggacacttgctcctcctcgtcttgctcaggcatctcctgggcacctttcggggcaagtcctgctgtcactgcacagctcaccttgtatatgtggggtgctcttctcctctcctgaggagttatgggtgattaggaagcaaacgcgtctcagacttggagatcaaatgaagagaggctgtgtaagcaccaggatgcatggggggttccggcttcttcgcagtttcacctggtttaacccaaaggcaagcaacagggatgcccagggcgggtgagaggtgctgagcggagctccatagttggagaatgtaagtatttaaaaattcttgtgtctattttactattaaatagactgtataacctcaaaaccagttaagaatctttgacattcatggtgtgaaggatgagaagctgggaaataacaaggaccttttcctcgtgtttcctccttaattatgcttgccagtgttttaagcatcgaggctgaccttcgcaggcttcagggtttcagcttgatcaccatgtggatgtggatgagtcagttcactccataatagctcttagaggtgtagaaaggaactacttctttccatgagtgcacctttattgccctatcttatagaaatagtagatgctcatcgtaaagacttacaacaggattgaaattggtaaagagaaaaaggcaatcccctacccccgtccctcagagatagctgctgttgtcagatcagttggatattcttgaagacagcttccttcacgggtgtttatatgtcgtctctgtcagtcagttacatggtgaacagacagcggctcaggttacagacgatctgtagcccagtgtttgtgctcagtatattacacttgatctgtcgtggaacttttttcaagaacagacagcttttgttctggacacagtatttggtggggcctaggtctgcctgtaagcatacatattggcagagcagtgtctcttccacatctgagctggtcaggcagagggccgggcgcagtgggggcactttgctgggtgaaagaggtaagaggtaagtcagcaggggcacaaagaaaccatgcgtattcacaggagcatctgagctccaagcccagggagctgagaggggtcactgtccttcacaaggaggtggcttcttttctggacatcagacagcattgttgcaggagatactgaataaccaacccctctgtgatgtagtcttcaagttttattcccttgggtgcaccagcggaaggtctgtgctgagaacagaggagggccgaggagacacttgcatggggttgtcgacagaggggcaccaggatgggtattgcccagagggaacctgcatgattgttttgtttaccatttttcttgagacggagtttcactgtgttgcccaggctggagtgcagtggcgtgatctcagctcactgcaacctccgcctctcgatttcaagcgattctcctgcctcagcctccaaagtagctaggattacaggcgtgcacccccatgcccagctaatttttgtacttctagtagagacagggtttctccatgttggtcaggctggtcttgaactcctgacctcgggtgatccacctgcctcggcctcccaaaatgttgggattacaggcgtgagccacggcccccagcctgtttaccaatttttaaaccatggcttatgacccttaccctgagcatcagtgacaggggaaccaagagtcgtgtgaggtcccagggtgcacagtggacatttcagtgtgaagggcgggtcgggtgccccagcttccacgctttccagcctggattgtggcatcttggatgtgaggccacagaccaagctcacagggatgagagatggtccgtgtgggtcagccggctcaacagaccttctcccaggaggctgattagatttgctgagcattacaacctgatgggcaggatttgttttaatcatgtaacacaatcacaaaattagtagtggcaccatgctatcgctgcccctttcccatgcatgtgctgcagacttatctgtgggggaaaaattatccatgccacctctcagaatgagccccgtccccaccttatacgagaccatcccagccaacacagtgaaaccccgtctctactaaaaatacagaaattagctgggtgtggtggcacacgtctgtaatcctagctactcgggaggctgaggctggagaatctcttgaaccagggagtcagaggttgcagtgaaccaagatggcaccactgcactccagcctggcgacagagcctggagactcgatctcaaaaaaaaaaagagaagtatcctaacttttgtttcattcgatttgccattaagtccggttattttagctgaaccttccccttaggtcagtgccagcccattaacctgagagaagctgggacagccccaggcaccagccagctttaggtctgcgtggaaagggtgttcttactaagagcagattctgggaggtgagagctggaagaaccggaggcagccctcccatttcacagatgaagagattaaggccccaagaggctaagtgactcgcagaaaagctgcccaggcgttccatgtagagcatggatttgaaccagcattgccgcatcgggatggggaggtgctggtttgcttgttagctgtgttgggtgtacatgttgttcgtcttcatgtgaggttgttagaagtagtttagccacattaagtgcccagtgcccccacttccccctgcaatccccgatgaagcaatgcttctctgtgagtgacatggcaggggggaccaatacctagtggactgtctgtgtctgtcacccctgtgcctgggaggggtgacccttggcttcacagactgtgctcccttcaccttgccccacggaccctcccccaaccaatttcttagtctgctcttgtggcgaaaattcagcaacagtaaggagtgagttaattctgattgctctttctgtggtaatcttctggatttatttgtgtctattattgagccatcccttattataaacattaatttcaccatgaattaaacagtatgactgactgagtttataattctttctggaatgaaaactgtcaggcccaattatatccagcccaggactgacagaaactcagcatatgaattgtaaatatcttgtctcctgcgttctttattttaaccagggaaaatgttctcgtgtctatcaacttgtcttaacttcagcaaatacagtggctcttgcatactaccagcatctaagctgcagtcgaaattatcttttaatacagcagtctccaagcttttttggcaccagtgactggttttgtggaagacagtttttccagggacccaggggtcgagggaggggggatggtttgggatgaaactgttccagctcagatcatcaggcattagattctcataaagagcacacatcctagatccctcacaggtgtggttcacagtggagcttgcactcctgtgagactctaatgccgccgctgatatgacaggaggcggggctcaggaggtggtgtgagcttatggggagcagctgtaaatacagatgaagcttcgctttgcttgctcacacgctgctcacctccagctgtgtggccctgttcccagccagccacggatgagtaccagtccacgtccctgcggttggggacccctgttttaatatacatctccacccaaactgcagtaagacaaatagctgtctactcttacatctcatgaaaaaaaaatggctgtgaatttaacctacggattttgttttttcttgcagtttctgacttgtaccttttcataaaatatccctattcaacattttcactttcaaggactcagcagtttcattttaggtgttaaaatgttttaaagcattctcgagatctgttcaaaattctacgtcttatatgaaatgtaggattctggctttggtctaaggtgacaatgttctaccgcttcttaggggtgccaggaacccctggcgggaggccgtgtctccctagtgtgacagctggcgttctggtggtggcgctcagtgtgttcctacagtcattttctcaggttcttgttattgtagcagcttgatggttgcataattattcatcatacctatcacaatttttaaatttttattgctcttcccactttagatagaagctcagttactcagaggctcaacaataaattgaacatgtagtcagcatgtgaaaaccccagggtgggtttttagcaagctcctgaaggcaggtgtctggagattagagaggagaggagcacaggggagccccgtgcccatacctgtggctggttggtggtgtaggcaggagatggtggcctggaccaccacgggcatcagacatcccccccccccaccccacctaggctcgcacaggagggacggggaggcaggagggaaagaactggtcgggcaggacgtccctacatgccccctcccttcccctccagcttttctcctactttggtggggtgttactgctggggcatgggaacagcggatgagctgggtcagggggatgggggtctagggcttggggagacctcctgtagatacaggcagtgtctttggttgcgttgtcttgctacagagagcctgatgtatttgtaagaagactaagaaggttttggatgatggtgatcaggtgcttgttccctttagcaggggaaattggggctgactttataacattggagctcactatatactagaagttgaattgtacttttttcccctggagttctgtgactcctttgaattctcacgggttaaatgggatcctggatactccctccctctttgtaaaacccctggagcattttgtggctgaaatttacttcttagagccatgaaatgccctccaaaaagtgaagcaccacatccaaattgcattccatgcccaaagtggttaacatccctcagagatgcaaactcagaagcatttttggttttgagagccacagtgctttacccataggatgggcaggccattccttctgctgactgcgtcagcagtccgggctccaggagaaccagcattcgcagtgggggtgtctgcactctctaccaagctgtccaggttcaggaattaaagatggaagtgagagcctgtgaaacaaggaagctatgaggtgtggggctttgccagaagtgccagggaggctgtaaaatgtgttttggaggcaacctcaggctggttcttctggggacctcggtgttgggggaacggcctgtttctgtagcttgggatgaacttcttccctgcatctgtgaacaagcttgtactcagcctgtaggttaacaagctggggccagaaggctgtactgcactggacccaaaacctgccctaggaagatgcttgcaacaaaacttgttatcaccttggtttataacagtgagatggaaacgggatggaattggggcatgggtttcaggactatgaagttattatttatgcattaaatattccgaagcagcctcagctaatggaacacagttcttctgaaggaaatgcggaagataatcccagcagtgcaggagagctgtgctccactcctcaaggctgtaggtgggcctctgttttcacattttaagaaggaaagggcaattttcttccttgccgttttgactttcaaatcctcacgccctctgctttgattctctcagacgtgaatcctttaagcagtgctttacacacccacgacaagggcgttcttggggaacaccgtgattctggaggggtattatgaggcactcaggaatgcttttgaagaaactgtaatgaaaatgagggccgggtgtgttggctcacacttgtaatcccagcactttgggaggccgaggcaggtggatcatttgaagtcaggagttccagaccagcctggggaacatggcgaaaccccgtctctactgaaaatacaaaaattagccaggcatggtagcgcgtgcctgtagtcccagctactcaagagactgaggcgggagaatcacttgaaccctggaggcataggttgcagtgagccaagattgtgccactgcactccaggctgggcgacaaagcgagaatctgtctctgtctctctctctctctctctgtgtatatatagtatatattatatatgtatatattgtatactctacatagtatatatttataatatatgtatataatgtataatatatgcatatattatgtattacacatgctagcatatttgtaatatatatattatgtattatgtatatattatatatgtatatattatatatgctataatatagttatatgtatatattatatatgctataatatagttatatgtatatattatatatgctataatatagttatatgtatatattatatactctataatatagttatatgtacatattatatattatgtatatatgatatgctctatttagtgtatattttatatatttatatatatgggggggtggaaatcactatcctctaagaagttacaaacctgcaaatcctctagagcccatttgggccggcaaacttttgccttgggatttccttagaggagaagagagaggacccagtcaaatgctgacgttgttgtgacagattctaagtcgcctcagggctcaggggaaagagccttggaattgcaggcagtggcgtggatgtacctgcaggggtgggcatggtggcatcttggtggccaggtgttcgtcaccctgcactgagagggcctggtgaatggcaaggtcaggggatgctgtccggacatgtcaggatgggaaactgtcttgtctgtggatctttgaggctgctgaaaaggatctttgagcctgaacttccagggaagcctgaaaccaatctggtatccccagggtttatgttttatttcatttattatagggattcaaggatttccaaataagaaattaaatcctaccattgaaactgtgctggtgaacttctgctaagtcctacatttgaaagtcatcagcggattatgtctgatccagtttgcagcgggctcttttccggctgcgttgaaatggatttctttattctatttaagactccacttccttcctcggcacagaactgacaggctgtggcagccacagcctcctccgatgctcctctcctctgtggatgtaccatctttcttccattgttgttttgttttatatttgggggctttacggctgctttaaactaaaaataaatgctcctccccttttctgtgctaaaaataatagttaaaatccttgtgacgtttaaggttttcaaagaaaattcccaatttctgagataatatgttgtttttaaaatgtcacctgcaatttcaggttcctttttttagccttgtgtataatttcacgagttttgtctggaatgcgtatttgtggttcctggagccaaacagaattgggggctgggctgggggtgaacgtgacacgggagaccatcaagtcattctaatattggctgcatgctgtgcttctagttgataatttggaggagaaaattagagtccatagctctgctggggaatgagcccacctgccagacgatggctgtcttaatgaagatgaggtcctggctcccttgtctaatgaagaatgtgggggagcctttagcagaaggctctgaaatcccgaggaaggacgcagtggaggcaccgctggacaggagctgccttccctggtccttgcagccaggctcctgcagcctgggaaggtggggcttcctcatctcaggtccagaatcctctgaaagttctcttccttgaccatagtccttgggccctgttcccttgttggtgttgtttgctgaggtagaatgctaagataggccaactggagtcatttccaggattacttcccattctagaatttttggtatatgttggtagtcatatcacatggatgacttttttcatacacgtttatgtgctgtaggttgaaccccactgtgaaattgccactattcaaacatatttgaccatatttgtgcctccagcacagcagcgagtacaagtagcacatgtgcctgtctccaagcaggaacatctcctcctggctgtggtcagattgatctggcaatttttatgtggtttgatggaatataaattgacctgggatgaaaactgactccagtaaagccttctagtttgttttactccatgtggagttagtggtcactgtgagccagttttcttggttttttttttttggacagagtctggctctgtcactcaggctggagtgcagtggcgcaatctcagctcactgccacctccacctcccgggtttaagcaattctcctgccccagcctcctgagtagctgggattacaggcgcacaccacctcacttggctagtttttatatttttagtggagactgggtgtcaccatgttggccaggctggtctcaaattcctgacctcaagtgatccgcctgcctcagcctcacaaagtgctgggattacaggcgtgagtcaccacgcccggcccgagccacggttttccatccctggtgtggttgcttcatcaggacttggcaggccatgtgttactccaggctcacttgtgcctccagcgcagcagtgagttcaggtagcatgtgtgcctgtctctgagcgggagcatcctcccccggctgtggcacctgggcaacgggacatcaattcctgctctttaatcctacccccaaaggtaataggagagcttcctctgtgggtagttgggccctttcccaggcatcctgccacctccttggcagcatctccttggaaccttacagaagccttaggaaagaattgctcccctcttctcccctccccctccttcccctcccccgcttccctcccctcccccgcccatcctccaggctggagtgcagccttccctccctcgctctatcccccaggctggagtgcggtggcacaatctcggcttaccacaacctccgcctcctgggtcaagcaattctcctgccttagcctccaagtacctgggattacaggcacctgccaccatgcccggctaatttttgtatttttagtagagatggagttttgccatgttgacgaggctagtctggaactcctgacctcaggtgatccacctgcaggctaatctcaaactcctgacctcaggtgatctgcctgcaggctagtcttgaactcctgatctcaggtgatccacgccccttggcctccaagtactgggattacaggggtgagccacctcgcgcccgaccagaaatgcttctattttatggtgaggaaattgagagaccagaaagttaaccgaggtcactgtcaaacccatggctcctggctccctgacccctcacacccatttccctctgcgtcctcttgatctcccatggacactgggatgggcagggccaggtgggagaagcagggctcatctctgagggctgcgttatggggtaggagtttagcctcagtaactgcagcactttctgcccatggcaacctgtgctgttttcacatttctcagaaattcccgctcttggagttttacacttgtaacatctgcttagcaaattttgaaaaattgaagatgaagagtaataaagtgtggacaaagctctgcagggagcttgttagaaatgctgatttgaggccgggcgtggtggctcatgcctatattcccagcacttgggaggccgaggccagcggatcacgaggtcaggagatcgagaccatcctggccaacatggtgaaaccccgtctctactaaaaatacaaaaattacccagatgtggtggcgggcgcctgtagtcccagctactcgagaggctgaggcaggagaatctcttgaactcgggaggtggaggttgcagtgagccaagatcgcgccactacactccagcctggcaacagagcgagactccgtctcaaaaaagaaatgccgatttgaaggttctgatttccagagtcccggctgatgctcacctgttgctggctttgctaagcgtcccaggttagtctagggcgagcaggctctgagcaacacagcagataatgagggagggatttagaatctggcattgccaaggaggtcaagggggactttcccaagtgtcccgctgtgtccagaggcagcagcagggagaacctgtcctgaagggctgcagtggtcggcgagcccggcacctgtctagttcttgggaaggatcattactatcaccaacgtcgattgtaaaatacaagatgcttttttctttttttttttttttttttttttttttgcgacagagtctcactctgttgcccaggctggagtgcaatggtgggatctcggctcgctgcaacctctacctcccgggttcaagcacttctcctgcctcagcctcccgagcagctgggattacaatcatgtgccaccacgcctggctaatttttgtatttttagtagagacgaggtttcgccatgttggccaggctggtcttgaactcctgacctcaggtgatctgcgcgcctcggcctcctaaagtgttgggattacaggcgtgagccaccacgcctggcccagacacttctgagaacgagctacatcctctgtgccactggattctggctggtccaggaacacaggtgtgcacacatccggatgtgcatccacacactcatgcgcatatgcccagctgtgtttccctgaagcatatttatccttccagtgttcctgcaccttggaaggaagcaggacagctggcctggaccctgccccacccttcctcgaccccacctactgagtgatgaacaattccacgccagcacagtgtccagcccacagataggtccctgtagtggagtaggaggaaggactattttggtatgcatggctttcgcgaatgttttgttaattttcgtttagctttgtatgaggcagcattccattttgactgggcggtaacagagttgatgaaagtttttaaaataaatactttttaatgggagatgaagagttttggccaattgagtcaagcatttattttattactcttattgccacaaacacaaatatgttccattcaagtgaggatgtatttgcaagtaaaaagatgcttcacattgttccaatgtttatataatcatgcatctttgtttaatggagcactgcttaatttataatgaatattttatattgttagaaagttaatcttatggtggtatgtgttgaaaaatcagcagtgcattgatgaatagagctcattttaattcacagtttaccctctttgttttactattaaagttcatttttaaaacttcacgatttaatttcttatgtgccaaatggaataaaccttaaaaggtgccagaaggtaacaatgaaaggaaaatcatctcatcacccttgacttcagccatctagttcctaaccctaaatcagcacctgttaagttggaaattttaccagaaatagtctcagccttgacaagcatatgcatatttattttgttttgttttgtttgtttgtttgttttttaaataacgagatggagtctcgctctgtcgcccaggctggagtgcagtggcacagtctcggctcactgcaacctccgcctcctgggttgatgccattctcctgcctcaggctcccgagtaactgggactacaggcgcccgccaccacgcccggctaatttttttttgtatttttcagtagagttggggtttcaccatgttagccaggatgatcttgatctcctgacctcgtgatccgcccgcctcggcctcccaaattacaggcctgagccaccgcgcccggccaagcgtatacatattttgcacccctcacccccgatacactttttagaaatgcatttgtgaggatcctatccatctctgtatcgcacctggctgtcatcacttgatagtagcctggggacttggggaatccccactgcagtatgttgagcttcagttactggttttactattccatgatgtggctatatccacagttacttaaccagggtgtggtttgttacagtgcagcaacagagtgacgttctgagaagccagacactattggggcctgcattttggagtcatcatcattgacctttcagttttccctggaccattagggtcactttgcagatcctctaaggccacattcccatttttctgcaagagtagtcgataacagaaagaagtgttttccaaattaattggtaatgctgttcactgatggtattaagacacaattagttacccctgactgagcgcttgctgggtgtcaggcccacgctagtgcgttcctcgcatcatctgtccacgggtaatgtttgtctgcagcatgttggggtggtgtttgggtgcacaattatgcaaaattttgcgcccccgatatttagctcccaatgtgtccgtgtcagtgggaggagagtagaggggcagtgactggaagtctttgcgggcagtgcagggagaagtccgcctcccaggcatcttcttcctcagggctcttgggctttcctcctgagctcctgcagatgggcctctgccggtctgctctgccagctggacaggcatgttgtgccccgaaagtctctgccctctagagatcactcagatctcctcctgatctacccagctgtcctttcctggagcagggagtgttcctctgacgggatgtctcactcggcatcgggagacccttgacgctgtcattgcagggcccgtggcatctggtttgctgcacagttgccctccccatgaccccccccccccccgcccagaacacactgggcagatgtgccccccactctgtgacctggtgggttgtgctcccccggcgtgtgacctggtgggacgtgctccccagcgtgtgacatggtgggttgtgctcccccggcgtgtgacttggtgggacgtgctccccagcatgtgacatgatgggttgtgctcccccggcgtgtgacttggtgggacgtgctccccagcctgtgacatggtgggttgtgctcccccagggtgtgagatggtaggacgtgctccccagtgtgtgacatggtgggatgtgctccctccccagcgtgtgacctggtgggacatgctcctcatttgtgtgacctgatgggttatgctcccccagtgtgtgacatggtaggacatgctccccagcatgtgacctggtgagatgcactccccagcctgtgacctggtgggttgtgcttcccaatcatgtgacctggtgggacgtgctccccatcgtgtgacctggtgggttgtgctccccagggtgtgcctggcctccttcagatgctggttttgccctcctgtgtcacacccatggtgtggttagccccttggcttccagccctgcatccatgcggtcctcatatcacacagttctgtgaaggtgatggtgtttcttaacttttaggcatcttatgaatcaggtcacttcttagacataatgtagagtgagtaagtttcagcattggaggacaatatattggaagtaaatcccatgtggaaagagctatttttctatcagtgggatgcacctcctccctctggtccagcccactcgtcatgtgttgcccgagctgccatgtgatcaccaggacaaatgatgactactatcatggggtctcatttatgataagaaatggcatgtggtgggtgtggaaaactgggttgcaggtaaagccatggtcgtttgggtcatctgtatcgggtgggtgcactgtgcacaggcagtcaggggaggcgggggagagtgcacctgcagagggctgggctctgtagaccaccccatggagcttaggagtcctccatctttctgacatagtctaaaccatcctggctgggtcttcagtgtttaatatctttgtgagggtcaaaactctagcaccagatctttcttctgagctgtaacctgttacttacaaacactgaagtgttaacttacactgtgagcattcaaatcttcaaattcaatcatactttttgctgtgtgtgtgggatttcagaaaaatgactattgtagtagacaagcaaaagaccaaatgtggaccgacaggctataacagaatcactcctcggaaagctaggtgtgtcctcaaatatctccacacttgccaacaggcacagtcaggagggtctgaagatacacgctccactgaagggctgtggctttagcaggggaaaaatggaaagttcgattttcagtaacttttgaagtcattggatagagcatgtgttaccgaccacagacttggacctggaactccccactggcatctagctgagtgtcgtgaactgggacaaactgatctttctggggtgagagtgacacagggaggcttgtctgcaccatcttcagtgaccttcggatgtgaaaatggcccattggaggcattttgacttggcctttacgtgagttatggtgtctgactttgtgtcctcctctttttcagatgccttcgtgaacagccaggaatggacgctgagtcgatctgtcccggagctcaaagtggtgagtggttccctctggccctggcacctgtgggaagggaggggctctgtgcacacccaagcctgcattcccaggcaactggtcatcgcctggggcccagagtggaagtgtgactctgggtgtgttcctgggaagggccaggtatagttgatagcttgggactagagtccaagttcctgagtgcccctgggacagctatgacagccatgactgccactcagccagggcggtgtctcatgtgcagggcagaggccatcatcatcctctctctcacatctcgtgggtgtgtgtgtgtccacacacacacacccccatgggttgatttgtcctttgcaggatgtcacggaaggctccacacacacacacccccatggattgatttgttctttgcaggatgtcacggaaggcttctgtcatgagtcaccaagctttggtatccatcatttttgaaatgtgactatttaccctgtgaccaagtattggcatgaaattaaaatttttgtcttttacgaaccttaccctttcggtgaaattatgtagagcttcaaattggcacgtgtaaaaagtggtccatcgcagccaccctttccagccgctcccctctaccgtaggatggaaggaaggggcaagtctaactttgaaacaaccaggttctttgtcgtgaaatatgtggcatttgtgtgtatggttatgtatctgtgtatgtatgtatatatgtgtatatatgtctaatttccgtgtgtatgtttatatttatgtaggtatctatgtatgtatgtatatatgtctaatttctgtatgtgtgtgtatgtattttctaatttgaccgtgaaagcaaagcagatgagctcttgctgttctgcagactccggcatgggcctgcctagtgtgtctgtcctctgcatttctattgatagcaccagatcccctgcggcccgtggactcctccccactgaccccaacctcattgcatgcttggaggacaggacaagggccaggagacaggatccttccggtccttcatgtctgagatgaggagatagagcaacaaagaacttctaggtctttgaagagacttttgtcaccaggaaaagtatttgtttttaaacttaggaaatgaagtacaatgagtgggaggtgccctgaggtgggaaggccctgtggtcactgtgccgtctctctcattggtgtctgacacacccatccccaccgcaaccgcggggtgtcatcagctgggcccatctccttcccggtgtctgccccccgccccattcctccctgaaggtctctgggctgtctctgcagcacttgcccgtgggagacaaagcgtctctcagtcctagtgctgtctcagaagcctggggttccgcaagactggcctggaaagagccgcctctttctgtcttttgtgtgctttgtcaccgcggcactggcagggtgtcttaagcctattgaagccgtccaggaaatgtgcgttgaatgaatggcacaggcttggcaatgctgttaccaggagattctcagaacaatcccgcagtttccgttacttcctgttaagacagccgctgccactcgggtgctgtgatgggcacggaacagtagtcacggtggtttactggtggtgatggtgtggatacagcgctggctctgtgcgggtcgtgttctaagtgctttacaaaattacttaatcctgacaagtgccccatggggagggataggtacggttatccccatttcacagatgaggaaactgaggctcagagacatgaagaacctgcccaaggagccacagtgagtaagtgggggagctgaggtgtgagcctggagctggtgcttccaccaccgcactgcctgacagaactttctcgacggtaaaaacctcctgcgtctgcactgcccagtgccgtcacggctggcgccatgtggctgttgagtgattgaaacgtggccagtcagtgccatcaaggagctgcattttaagtttgattctagttcatttaaattgaaatagccacacagggccagcggccaccctactgccagcattacagactaactgatcgtcaagtattgaaccacctgacttggcagttcaaggtgttacaggttcagagagggcccacatgatcataccagcccataatcgaggatgcttaccaccaaaaacttgtgctctgccggtattttgaaagcatatgattttctggaatatctgcccagagctgtaggagacagttgcgtttgaggcagcatgggctcctcattctgaaacggactgtcttaaggcttgcttcaatttgctgacaccgtgggcttcgatgctgttggttctacagttctcagaacggtcctgtccctggcctgagtgtggatggacgagatcctggcaggcccaccagctctgctctagcccaagtgccttcttgttgtggcatcagcgggcactcgtcctcatcggcacccccagcagatcccttgtgtgctgaggagtgctcagggactgaagaaagcgctgctttgttccctaggcagcctccaagtgcctatagggctgcaattgtttccctcctagcgcagcccccccaggacaggtggcactttaggtcagcgtctcaggaacccagcccctgcttcacaaacgcagcagtgacatgatgtcatggcaagcctccaataggccctttatgtaacattttgcaataaatcttttgaaatctgtcagagaaaaaaattcaatgttcgctttcttctcaagagtggtagtaccatgccttatgttttattttctttctttcttttttttttgttacggggtctcactctgtcacccaggctggagtgcagtggcgccatctcggctcactgcaacctgcctcctgggttcaagtgattctcgtgcctcagcctcccaagtagctgggatgacaggcacccaccaccacatctggctaattttttatttttagtagacaagattttaccatgttggccaggctatgctcaaactcctgacctcgtcatccgcctgccttggcctcccaaagtgctgggatgacaggcctgagccactgcgcccggcctgatgttttctgaagttgtgctgtggtcagatcgtccatgaccagttgcttttggtgctgcacaggagccaaccgctgctggctgcagatgtgtgcccaacagcaaaagcttgatgcttctgtcagaggggaaggcacataggctctggacatcttgcctgtgtaggggacctcagtccccagctcctcacatcctatttgtgtgttttcattgaactccaactggaatttttactaaaagccttgatttccttttcagcaaacctcagggttagtgtggggctctggagaaatcagtttaggaagacattgcattccctttggccttgtgatgtgaagggccgagtatgggttccaacgcacttcatgtgcctgcacagacggtgacccctgcacagaggttgacagtggcaacctcttcctgccttaagtacgtagttctgtgattttcaagacacctcattcctcctcatgtagctctttggctcgctctggattgatttcctccgtcttggtttacttccagcagtcgctccgacagcttcacgggtggcgtgacacacttgaaacggcattttgaccccttattttattttcctttcaccatcaactgttaatttccaccagcgtttcaaattaaaatgatgccatcgtgtgtgactgaggtggtctgtgagatggctgttccagccaaaccaaaccccttcccactccactccaagattgattgccctaagggagaacttaggggagagcttaatctttgcccatcttgttaggtggaagaaggcaggaacgttgctatgcagagaaggcacagaccaaaggatgtttggttttggagcattttcttcctcgagaaagagaaactgatcttaattaaaaatttaattctgtggcatactgttttggattttcccagcatgaagctgacatgaagcgggtgcccttgagcaaaagaataattagtaggtagaaattctccgattatagaggcccagggtaaaaaaagatgtacgtcggattaggaggggaaacagctttatttagaatctgtccacacagcctggcttgagcctggctctgagccttagtaataagcatctcattcactcaccagcagtgcagtcatgcatgtactcatccgttcttttactcggcccgtgctcttgagcgtctgccttgggctctgcattacgcagggattcagagaacaaggcaaatgagacaaggtgcctgtccttgaggaattgtcagtattggaggaagccagatcaacacactgatgtttccaaaataatgtgttcccttgtgagatatccttggggcagagacctaagggagctttgaggaaaggcacccagttgaggctgtggcatcaggaaggtgtcttcgtctcttctggctcctgtaacaaaatatcatacactgagcagctgataaacaacagaaatatatagctcacagttctggaggccaggaagtccaagatcaaggcacctgcagatttgatgcctgaggacctgcttgctggttcgtaggtggcatcttcttgctgtgtcctcacgtggaggaagacgcgagaggtctttctcaggcctcttctacaagggcgctaatctgctcccacaactgccacacctcgtaatacaatcaccttggggattaggtttctttgtttaaaattttatttattattttgtttttattttttgagacagagtctcactctgtcgcccaggctggagtgcggtggtgcaatctcagctcactgcaacctctgcctcccgggttcaagtgattctcctgcctcagcctcctgagtagctgggattacaggcatgcaccaccacagctggctaatttttatatttttttagttgagacagggtttcaccatgttggccagtctggtcttgaactcctgacctcaggtgatccacctgcctcggcctcccaaagtgctgggattacaggcgtgagccaccatgcccagccaggggttaggtttcaacatatgagtttggctgggagtgtgggggtaggacggggaagcacaaacattcctaccatatagttgaaggcttgtcagaggaggtgacatctgaactgatagtaagagtaggtttcggggaatgattgatatggaaagctttagttgcctggagacagcaaggcctgttaggatggggcttggtagctgattgactagaaggccaagcagggagcgggcagatgagaggcgggagggttgtaactggggtgtaagaggacaggaccgagcataggttttagaaaggccactctggctgatgagtagagagtgggagcggccaggactgggtgacagagaacatttggatccatgagccatcactcagacagcagaccacggtggcctgtaaatcactgagaaccttttttccacactgtcatgccaaatttgttctcttatatgtttgtttgttttcttttttgttgttgtttttgttttgttttgagacagagtctcgctctgtcacccaggctggagtccagtggtgtatctcggctcactgcaacctccgcctcctgggttcaggcgattctcctgccttagcctcctgagtagctgggactacaggcgtgtgccaccacgccttgttatttttttgtagttttagtagagatgggatttcaccgtgttagccaggatggtctcgatctcctgacttcatgatctgcccgcttcggccccccaaagtgccgggattacaggcgtgagccaccgtgcccagccctgtgtttgttcttaatagctattggcttcatcatctacttaaccaacgttccttcctccctcctgtctctcctcctctcccctttatttccatctctcctccctcccatccttcttccttgtcatccatctatccatcgacccatcttgtgtttaccaggactttgttggagccagggactatgacaagtgtacagattcggagctggtgtcttggcccgtatccagagacagagatcttggccctcggggtcctaagtgtagtgggaggtggagcccagggcctcaccagccactgtcaaggctgtctgggggtgaggggaaagcagggaagctttcccaagagaaagtgaagccctcctcaggtgaaaggggaggggtgctcaggtgacaggagcagtgaagtgttcttgcggcaagttcatggacctgctgggcctgttagctgccagcaaagttgtgtgcgaggatttggaaggagacagtttgttcctaaaatgtttggagttgggcctccaggcagcaggagtctcccacggcttatgaaatgaaggagtgccactttctcatggtcactttgtttctaggaacctctctggtgttctcgggttgaaaagcaggtgcttgcaggcagagagaggccctagaggctgcttccttgatccgtgcacactggagagtccacactgaggtggcagcaaggtgcccaggagggagcggactccctgacttccagccactgggagtcggggatggcctccagctttctggcttgagaggctgggtgtgatgtggcctcagaagctgatgaggagactgggagagagaggcaaggtgtggacccatcgaggcgtgaataccgcataggtggcgtacggatgtatataaagtcctggtgggagctaagtaggggcgcctggagctggggtggacggcggccaggggatgcgatttgggaataggcagcttttttttccccccacatccaaccttctatcaatgagttatgattccagagtctgcagggtgtctcctgttaaatggaatcgcagctcattgagagaaggttggatgtggacaggcgcatgttgggacattagagtggaggatcagctggagatgtgaggatggagccctggcgagtcccagtatgtccctgcagatggaggaagaacccacagggctgggagggaggtagaggcggaagccagtgtgagagttggaagagagtgtcttaacagcagctgctggtgatggggccaggtcagagcgagacaggctagtggctttgaaatggaagttgcgggtgacctagtgggcagtttcctggtagcaacagggccagagcttcagataatttgagtggaggcaggagggaggtcaacaagtggaaccgagagcaagcggggtgagtcccagctcagggaatggcaggtggccttaatgagcacctgtgcctggggatgggtgccttgtgatgttttgggctttttaaggaatcgattagatcatgcttaaatttgatcactagcgatgttctagtgggggaggaaaaggttaaaatgcaggagatttttgatgagcagcttcccagagaaggcggcatggggggtatccagctcccaagcacagggaaagggaggctccctgtaggatcggccacttggaggctgggaggccaggtgtgtctcctgtgtcaacagggaggcttcctgtgaagaatcccctggaaagtcagccttgccgccaggttactgctaggacagaggccctcatgtcaccctccctcctgagggtcgccttctaatccagcacaaacgagcacctttgccgtctctcccagcagccctggcactgtcccctttttctcggagatgccttggtgggtcctgtgtctgggaggcaggtgtgtgccctcctcgcctgtgtggccggcccctgccttgctcctccacccccaggtctccccacactgcccttttctgctcctgttgtcctgcccccaagtctaccctagactcatcccctaaagatgctaccatgcatgggtcctcgccactctccccacgtcactcacctctgccctcgggtgccacctcacctgctgcttttcccagtctctggagggtgcacagtagatgccggcgggctaactcaaggaacacagccctgatgtaaacaatgtgcttgttttctggaagaatgccaaaccagtgtttataccagcattgctgatgccgttgcagctgttgaggctgatgagaacgtgagatgttaattaagagtgttggactcccttttactccaatggaagtattgaatgagcttgtttttggccatccagccagtgcttggttatgtttgtgtttaggcctcctgtctattttagcctcttagtatttgcaaaatgccaaatagagtgatttgatgatgcttaacggttgtccgtttctgtttcagggaattgtgggtaacttggccagcggcaagtctgccctggtgcaccggtacctgacgggcacatatgtccaggaggagtctccggaaggtatgctgtttggcaggcagttgcaaacttaagaatgtagttttttaaaatttttccttagcatattataaatcatgactttgatgtatcacaggtcaagaaagcaataaaacataccaagcggtaaaaacccttaagtatgtggtttcttctgtagtatttttagcaaacccgttatattcactttgatatctggaatagcgcagtagaaccatgaaatactattgaatttatttcttatctaattgttctgtcctttcaaatgtcctttttaatccagtgtccttcttatccattgttgctcctttaaatattgactggacattcctgtgatctggatattgaatttatacataatttgtatgtaatgttacttagtcatagataagagccttccgggataagacgttcagattaccaccaccatatgtttgagtatgtttccccccttatattataaacatttaataatcattttgcatgagagtaagatttttttttttgccattaggcatttgcttcttcagttaacatgtccatattttattttttgccttaaataaaattatgataatggtaggaagcatttagctcccgtgtcccctaacgaaggggtgtagttgacaagcagttttctaaatgaaattttctctccgtgtaactttgttaaatccaactctgagacactgaatttctggttccttctttttcttactggctgttccattctttgcagatatggatgcaggtaactattcattttcttcatggcagcgcttgtcttgttttggagagagaggaaaggcaccactttgtactgtagcgttcccttccctccttgttctgtgtaccatcctgttttgtttcattttatctttttcttcagttgaacattccaccctgttttgtcccttagttgtctttttagcagtagtcccaagcagcttcacctgttccctgtaacacctgtcctagcatttaactcttgtcctgaatactgcggaaccgttcggagaagtataaaagtggcttgaggctctgccaccgttttgcagaattgtgtagtcatgtcatgaacacctcatgcatcaggaagagaccttccatactgaaatgatgatctaggaagattagaggtgataatgaaggcttgtatgtaggggtcaataggagaaagcttgcctgttcactgagaaatgcatacagatgccagaaaatggcatgatttggagaaatgagcaaaggccacattttgtcagggctctgtccctgggttttgacggcttttatttgctcctttgtgtcggaatatgaattttagccacggccagctggtgacaccttttagagaatcttttagagatttttcctttgggttttccacttattttcaagggctagctattgtagaggttatacagaggttaactcacctgcaaatgaaatgaccaccttttctaagtaaatctactttcagggccctgcaactctgtggatttcaagctgggaccacaggaagttacatgagtcgggcctggttttgttgctgttgctctggcagtctctggccctggggttcaggtgtctggtggggcagcgctggaggccctgggtttctggagtaagaacaaggaccacgactcactcatggtggcctttctgctatatggctatttggtcatttttgtggcttttcgctgttttccctttgggcattcacagtgtgttccattgtatttgggcccagctgggatgtcttttgcagtgcataattgacccttacatgttgactcacaccaaagcatttctcttgaacgtttatacatcaaaaggaaggattgtggggtgacctaaactgatcactaacatccctgcttctttgatttttcaagtaatgcattttactgcactgaaatttcatagtattgtgtatggtttttaaaaatacattatttttaagagtaggagcgtgggtgagtaccttcctttcttcatctgcaaagtggaagtagctcatcccctccatggggccccatgcccaaggcttcctgggtcaggggaaagatcatgatccctgaccttttctcatgccctgcagcagccctccctgggcatgtggcctctcaccttttgactcgaggtcccagggattgttctgtgggagtgtgaggagctgacagcagcagacacccaggtgcaccccagtgggtgtgtgtctagggcccctgggtgctgaaagaattatgaatacatggctccttgtgcctggaagcttcttagtcctgctgaattcatgcttctcatggctgagccacctttcccgtgtagaaccaagcaggtggccactgtctttgcccctcttaatgagaccagggaatggacttctacttcctgttcatgtgactgtgtgcctcatgacagtggcaggagggagccataacttgttgtaatgtcacttgtaatgaagggagccatacttgttgtttgggaaagaaaacaaatgagaagccgtgtttctttcataccacggtcttgccatcctgaaattccctctcatgctcagggagcctgtacctggaaagtgatttcaatttttgtccagtgagttagtgttgatcaattacccatgctttgcttaattgagaagctttaggtatagagtgttgtgggtttgggatataatttactgtgttgtcacctgggtgtgtggagactatcaaagggatgtgttgtcctcggggagtgctggaggctgacaaagctgatgatggcccagcctcacctgtggttacttacccacacaaaggtgagggcactcccacagtggtgggagtggttggcgcccggttgagggattggattttgagtgagctctgtggccttcccatttcttggtgtactgctgccttctcatcagacctcctttcctcttacaactgctagagcgatcaactgggcagctactttgaatgaaaggcattttgctgtgtatctgcctgtccagatagttccttggattctccctgcgcttcttaatgtctgtgccctgttcttctgatttaattagtgcgtgagtatcctttatgtcataatcctgacccgtggctgggatatgtagactgctgggaggggtgagggtgagggccttcctgtcttcaggggagagctctctcgtggtagaaacatttctggtgcagagccgtctccagatccaagcctgcttttcctcagatacatcagatgcattttagctccatcccagagggtaatatctgctgtcttttcgttgtatgatgcattttggttgatattttattcttgtagtgaagagagccaactcacaagatttagattattttattttatttatttatttattttgagatggagtcttactctgtcacccagactggagtgcagtggcgtgatctcagctcactccaacctctgcctccaggattcaagtgatcctcctgccgcagcctcctgagtagctgggattacaggcaccccccaccgcgcccggataatttttgtatttttggtagaggcagggtttcaccatgttggccagactggtcttgaactcctgaccttaagtgatccacctgcctgggcctcccaaagtgctgggattacaggcatgagccaccacgtccagccaagacttagataattttaaagatgcagttcaaatgagggaaggatataaatattctgtttttcaattagtgaattaacaacacaaaagtgggtaacaccgtagggaacttgtgattccatgaaatcagtcaaagagtaaacctcttggattgacagattccttaatattatgtgtgtgtgtgtgtgtgtgtgtgtgtacacctaggtgtgtaatatatgtatgtgtacttcagtcctagcactgtagtaacgaactgccacacacagtgtggcttaaaacagaaatgtattctcatagttctcagaagtctgaaatcaaggtgttgacggggttggttccttctgcagcttagaggttgaatctgttctatgtctgtgcggttctgatttaattagtgtgtgcatatcctttatattctaatcctgacccatggctgggatatgtagattgctgggaggggtgaggtggtgagggccttcctgtcttcaggggagagctctcttgtggtagaaacatttctggtgcagagccgtctccagatccaggcctccttttcagcagatacatcagatgcattttagctccatcccagagggtaacatctgctgtcttaattgtgtgatgcattttggttgatattttattgttacagtgaagagagccaactcacagatttagatgattttaaagatgcagttcaaatgagggaaggatgtaaatactgtttttcaattagtgaattaacagtgcaaaagtgggttactccatagagagcttgtgatttcatgaaagccatcaaagagtaaacctcttgtatagacagattccttaattgggtgtgcgtgctcacacgtgtgtgtgcacatctgggtgtgtaatatatgtatgtgtacctcagtcctagggctgtggtaacaaagtaccacaaactggcttaaaacagaaatgtattctcacaagtcggaaatcaaggtgttgacggggttggtccttctgcagactttgaggttgaatctgttgcatgtctgtgcacagttgttctgatttaattagtgcgtgaatatactttatcctaatcatgacctgtggctggtatacgtagatggctgggttatgtagatggctgggagggttaaggtggtgagggccttcctgtcttcaggggagagcttctggtggctgtcagcaatccatgctgtttcttggctcatagactcctaaccccagtctctgcctctgtcatcacagtgttttcctggctatctgtgactgtccaaactttttcttataaggacaccagccattggatttagggcccatcctcctccagcatgacatcatctttacttgatcccatctgcaaagaccctctatccaggtgaggtcacaccataggtcccaggggttagggcttgaacgtatcttctaggggatacaattcaacccacagcagtgtgtgttatatacctgtgatgttctccagggatgtccaatcttttggctttgctgggctacattggaagaggaagaattgtcttgggccacacataaaatacactaacactaacaatagcaaatgagctaaaaaaaaaaaaaattatacacacactaaaaactcatgtgttaagaaagtttacaaattagcgttgggccgcatccaaagctgtcctggttggcaggttagagaagcttggtttagacggtcgctgcacttagaactgttggagttggccccatcacttggtggtggtcatggttctgccagtgatgcttttgcaagctctgctggtgttctagaacctcacaaggactcatcggctggcagtgaccttcacacctctgaggacaatttcacagctgccgttcacttcctataaagagaatgagatgaaaattagttatttgccaattgagccctattaatggctgctgattagaatcgtgtgacattttgggtgtgtaatgtgacttccctcgtggtgtgtttatgtgcttaatattcagcgtcccccaacacagaccccacatgatgccactcagcttttaactctcctttcaaaagagaaaaagtcaaaggaaacaaagctaggatgtccagtattatgtggacattagataggaaatgtggacctgcccaagacacttcaccccctgcaggtggggagagtgtggcgtcctcctgagatcttttcaggttgcagaactgagtcattgctctgagacccgttccccaggacaactctctctgtgtcacccatggcatcacaggcaccctgggccatgggccctcccgagctgtgcaggttagcttgtgtgccagaaggacctgaggaccagaaaagctgaaagccagcaccacgctgagatcgtggcacacctgaggagggcagaaaggtggccccacaagcttcccaagatgaaactaaactgtatatggattgagtgggagcttttatcgttggttggttggttggttggttggttggttggttggtcgatcgacagagacttaagaatgttcatagaccaactccaagctgcaaaatgaaagtaccgagaggaaggtgggccatctgagagccgcctttatcccagatctggaagaaacccacatctaggtgtgaaagtggcaaaaggagggccggggcctgcctgccactgaggcccagcggctgcctgcgagggtcagtggtgtcgtagcctgctgccgccacacagagggatttgcagggaagggccttagccaggcatgatgtgggagcgttggccctggcattcccgggtcttcatgagcttaattcagcaggggctccttccttcagtgatggaatctggagtttctgactgattcttaaccaactcaaaattttaggcagaaagctagctccaaggctgaggcagccctgaatgtgcctaggccaacagccagcgagctcctggccgggagcctggtaatggggatggctggtaaaggctgtgccggccctgcctccctcccagaagggcgaccctccagccccatgtccaggctctcccatcttcccagctcgggccacacataggcagcagctgcccccatgctctgtcccagagacggaacacactggtcactgggagattagcctccctcattcattttcccgatagaatatgatagctgaggtagctggaagagtatggtcaaggagctcaaggcagctctttcactcaggagcctgccagcgtagggcaggggaagtcagtgccctcccagatggaaaaggtacctgcggtggtggggggagggggagttccctatgtaaagaagagtccaaaacagataagggagactgaagaaacctgaacatccagtgctcatgaggaaaagctttaagagaaaataccaggtgctaagagtaattataactaccaggtaaggaccagtgagaaacagtgggtgagattaggctcgacagttccctaactcaggaaagtcgagtttctgagcataagtcataggaaattctcaaacatacttttgctttgtgcctgggaagcaggaaagtacaccagacccacctcatttcttacatctctccaagagaagcctttcgcttgtctgtttggtttatttggttcacatcagagtttgctaaaggcttggaggttctgtaggaaggaatgagccgcttcacctcctggagaaaggacgtctcgtttccagcatgtcgggggtcaggctgtgctgcactgaggctgaagggttctgggattttccactgtgtgtttggtttctgttgcttgttccaagctgctgacgcggtgtgctggatgagagttctactggccactggcttctggcctccagggccagctggctgtacagccacctgcaagtctttgttcccggggttagccttgccaccctccttcaggactgcctagaattgtttcctgtcatcggggtagtaaatgtgttctcaggagcacgtgtatcttaaatatgttttaacgaatgtttacttagtttcttagaaacaaaacgtggtaaacacccagtcttattttctgggacacatgaagtgtgtttaagctgtcagctccaaaaaccctttccaagtcaaataacttaaaaaaaaaggttgtcagctaccactgcatcccagatgttagagtttatttctaaagctgttcttgggtgctgtttaatgttccagtggaaaaaaaaaaaaaacacctgtaatactccagtaacatttgactagtcgtgaaatctagccatttagatttttcaacctcaatttgaccgttagttgcaaccaagtgattataaacacatgataattttttaatgagaattatctgtaaacgttgagatgatgagcctgctgctatgttggtttaatagataaagcagaagtcagttcagccatcttcactgatgattttcagaattaacctgatcactcaccatggaaataccattcccctttgttcttgtcttcctatgtgtgtgacagtccctaacttgacccctggcatggaagccatcagtgaggatcaggtgatattgtctaaaaataggtaaaggatgctaacattattattagatgttcaaaaaaataataaaagggaagcatgttctgtttcattttgagcaagaaaaaaagccgtaaaatcagaataaggagatagtcatgtttttggcattgatgaaattggcaggacaaagtgtgtttttgagttggctgtatggaactcagaatgtattgtcccatattgttataattaatttgacaagaaatccagggcttaccaaaagccatactgggcctgcattggagcctgtgttccagagaaaatacctttctgaataagtaactgtgatgcagggctgggacttacacccggtctgggagcgccctaaagaggacaagcccgctggcttctgtggggagtcactgtctcctgagggcagcgcacagaggctcatgtgtgtcccttcactcacagagcccaacaacagcacagcacatgctgttgacacaactgttgctttcctaagaaacctcacggcatcagatattttaacaaaaccgttctttaagaggaaaatggagactagagcctagaaagtttcacgtatgtaattacaaatcatttttcctagagaaattttaccccaaaagtgttctgaggctgtgggtgcatttacctgtttattgcggattaacagagccattgaatctatcccaatggaaccaccatcacacactttcacctgtgttcactgctcctcccgtctgcccatgtctttggccttgatcacgccatctctctggaagcccagctccaggtccaggaaaccagattatagcagaccactgtgcccctggccagggaaccgcctgctctggtctggaagccccggggccatgctcgctgtgttagtcaatgctcttttggttgcatgagatagttgaccaacttaggttagctaaaatagaaaggcagggagggggtgggccagtggtgaattattaacttcttaacttgcatctctggagctgccaaggggatggatttagttttagaaagaccctaatctcctgatgcactgaagttcttgaggagccctctcccccatttcttgcctgtgttgggtgggcatcatgcccagcaaggtctccccacttggtagcaagcccttcatggtggtttcggtccttagtgctcagatgtggtgaggagggaaaggtgaggatttttgtcaatagctacagcaaaagactctaagtcagttccatgtggcctcatttgagtcaggtgcttttccctaaaacaatcagtatcacaggttggaggggatgttttgattgttctgtcccttcgggtggggagatgaggtcagcctaattgagctgagtggcttgagcaggagtatgatagactagggctgggcagaaggtggactccagaaaaggccgggaggcaagtcccaaccctgtgtcttcagggtttgtccgttttaaacattttagccagggtggggctggggggagggggtgttgtgcaatgcagttctctttcctaattcacagatcacgttacacccagcttgcacggtttgaacttgggtgctaaaggagaagcacctggggtatgtttgaattcaccccaaagctacctctggtaagtgtctccttgtgacttttacagtctcacttgggctgtggacctctgacattttcaggcaagtttttgcttcttaatctccaatgctgaaagcttagtctttggaatgttatacattgtttggatcttaaaaatgtcagctcacaaaataatgtttttacatccttcctccaacatcatcaaccgcattagctcaccaccactcctcctctccgcttctcccccaacctgttttatcggtgtcaggaaaggggagcgatcagtctctcaggaggtacccatattgatcataatatagcctttcttaggcgtagcagtccagcaatcagggttcaatggtttcctctggaaggtagcatactgaaaaagacgaagtgcagagaaaagacagggtgggggtgcagcatgtctagtttgggggcctggctgtgggtcagaatggagagattgacacttcagagaaggccgggaatgaaattgaatgtgcagagcacacgttccactcagcaccgattagagctgggattgcctctcgcaactccccaaagaaaatgctgcgtccttgtaagaccgtgtctgcccagtgggggcctggacactaagtgccacttctctgcccatggcaaattccaagggccaggacgatggagacaagggaagtagaagttgaaagaaactcccaacggcaaattaggtcgagtgccagaaagaattacatcaggagaatctgagatgtagtgaaagtgcccccaagctccccgctccatttcatgtgctactggctggctgtgagatctgaaaaggactgggcccagactctgtgtgtgtgtgtgtgtgtgtgtgtgcgtgctcttaaatcaatgtaaattaggctatatacagctgccaataatctgcaaaagatgacagtttcatatgattccaatggcttaaactaacaaattcatgaatgattgacccagaccagaaatggaaacctgattcaactcacagtgtagtcctttatccatgcttgttggcttctggaacgcacagtgttcaggaggattctgaggcagggtctgtgtgcaggaggagtgctagtgtgagagctgctggtgcctgccctgggtccgaaagctggtggtggtctgttcttgttgtatgagggcagcccatgtcgccagcatttattttctgagccccatttcttaatgttgtatatttttttaaaaattaacaccaccataagcaagaaggaaaaaatcaacacttgctctttgaaggccaaatacattgaaatgaaagcgtgcctagtggagcaagagcggggcggggaggaggggaagccagcctgcagcattgccctctagacactaagaagaagggagtaggtttaggttggatgaagaagggaggtttggagcctggacgagagcaggggttgtggaggaatggtcaaaacccaggcgtgatgtgaccacaccatctggcaggggaccaggccagctgctgtgtgggtcttccatgtcccagggacggagagaggagaagtggggttggccaggcagaggcatgataagagtcagagtggctgggctccagggctccagccaggctattagcaggagcactggctttggagggggacctaagaggacagataggggaatccccaggccacctctggaccttgacattgactaatgggatgagctgctggaacccatcaccatgaagccccctgcactaactagggcgtgtgccccttgaggagccgcatccgcttattgggcctaagaaaaactgattcccaggtgtgtttgggccgtctagaaccatgtgacctggcagccacttcaacttgggcagcatctcggctgggagccccagggagcctggcagtacctcagtggcagatgcagctcgttccaagatgttccagaggcaggaggttcctggaagaaccactgggccttgcagggtcagctcagcctgagagccagtgaccccctcccccaggaggatgctgtaggggcagtctcacggcggtctcacctctgccacctgtggatgagaggctggaccgggtcttggtgctttccagctcagggcgttggtccacttggttattcttggggaccaaaatccaagctaggatggggacagaggcctggagacaacctgctggcctccttccattaaagccattacagtgtcaccacaggattgtaagaattacaaatgcgttttccagagtccccagagaaaaaggagtctggcagttagaagagtaaagtgcatctgtcaacaaaagaaataccaaagatgagactacagcagcgacttgtcacctcttccgtgttgctactgcctgagaacagaggtttttagtttctttaaagggttgtaaacataaaaacaaagaaggatacaacatgcaaggcctaaaatgtttactttctggccttttacacaggcagttcgccagccccctaccctacagtatggaaaaaaggcatagaacagtcaaatcacgtaggatttcttagtttctccatgcaggctcatcgaatagcaaccatcctttcttagtttcttgaaacaagtaccttatttacattcagagaattatatgtggacaaacagctcataagcccgtacttttacatactcacttcctgaattgcatattgaaaaagagagttcatgtaaagccgattattatttaatctaaagttatgttcacataggaagcactagtgtagagaaatagggtctgagggacaaggagcctgtgtgcccgtgtcggcagccgagtaactgccaagggtcccctgcttggcactctgctgtcccacttgcttcctgccctctctggattctaacacttgtgccattgtgcatccgtctcaggtcatggtgctgttacttggtgagaaagcattatttaaataccccagatgaggagttaggcactttctccagttttgcaatgctcttttgtttaccttttaaaaaaaaaaaaaaaaaaaaacgagacaaggtctcactctgtcacctgggctggagtgcagtggtgccatcatagcccactataccttgaactcctgggttcaagcgatcttcttgacttggcctcccaaagtgctggtattacaggtgtgagctaccatgccatttaccttttttatgcttaaaataaatgtataaaatattaaaaatcattttcctcccaagaaccaaacgtgtattactaaatatgtttagttgaccatgcaggctatttgagagacagtgggagatgctgaaatattcaagcaccactgttttggtgggtatcggaagattttcaatcaatagtttacttatttggttatgtattaggttgtattgggtggggccaatcattatgtgactatttttttcttcagagtggtgattgaaaagcagcccccaaccgttttctccgagaggtgcatgctgagcctgcctgcagcttacccccaacccccagcccctagcccggctctccttgtcttacatgagtcagtttccttctgctgctattctggacaaaaacctctatcaggacagagaccttgtcttgttcaccctattcctggcatcaaggctgtgtctgacatgtaatggggatggctgtttgtttggtggtggttgagatgaccaagatgttcttgacctgtgtagggtggtagtggagaaacaggcacaggcccttgtggtgtagttgcgaaaaaggagctcacactaatgggaaccagattgtatcattggctgagtatacagcagatgcgttcccctttgttattttatcacttgcttacctggaagctctggtctgactttaggaacatgccacacacttggataaacatggactcctttactagagatttatagaatctttttcctagagccatttgagaagcacttgtccaagacgtgctattttataggctattttgatgtaagggaaaagacgtatcctggatcttccagaaagcatggaattatggctgcgtattaggaagaggcctggctttcctgtgggaattgaacagaagacaggcatctctcatgttctggttgttgcagttttgcttcttctgttcattgaattagcgtttcagagctctccatgtgtgagtttccatttggaaatggtatagtcatcatcgtaatgtagcagtcattcgttaatttttatgagccacttgtgacgtttcaggaagctgacagccgacatggattagctcatttatacctagggaaacagaggcaccagaggccacaaaagctattcagggtcacacagcctatgtgtgaggtttacataataaacgtcaaaaaacgcaggctctaaggaacaaaaaggaagatttgagctgggtggaggctccttatctctcctacaacctgagccaacaacaccccatcacttcaccccaaagtgcgcagggaagaaatggaaggggcagccgtggcctcatcttttgtgctgtttttctccagcacaaaaacctgtgtgctgtttttctgcagaccttggttttctcatcttgaaagttgtgaatctgtgtcacattttcctggtgtatcgcgtgcacttttgatctgcggattcagatctttctgcgtctcaggaacattcctttgtcttttatcttcgaatagtctttgagttcttttgttgtggatgtgttgtcagagataccatttatccttttgtttaggtccgtttgtcaatgaacttctctcttaaatactttacctctgtctttttaatctcattgactgtgtctgtttcaagccattcctctgtgtcagaaactcagctttcagccttgtctcttctgctccttactttttctaattttattcatcagttccccaaatgccgttttgatcctcagatctggacgtttccattttatctcatattgtttcaaattctcatactggaggttctcgtctcctggaatggctgttctttcttaagtcacactggagtgggaagcggttgtaagggacttccttctgctttttgagctttgttttcttctccattgttgctttgtttctcttctgttcccttccctccttcctctccccaagcctctcccgccttcccattttccctgctggggagcctttgcataatgtccccagccctgctcttcagccttcttggcttggacctctcttcccagacattgtctttccctgagaccgatgctgaccactgggaagacttctccctcattctgagtcaaatctaggctgttgggagcccgtgaccgccctgcttcctgtggtgggagaaggtgagggagaggagatgctctcatcctgagtgtcctggacgagatgggccagaccattctacccacactcccatttgccagacctcagccacctcccccagccagccccaggggtgttgggggcatctttcgagtctcactgcccacgctgtgggagctgagactggatgctgttctggagatcccaggatttactgagcatccatgctctgccatccgtctagttggagggagctgcctcccgttgaaagagtctgcccttctttagggaccagggctctgctcttcctgggaatttaccacatcctcttccaggttcccttcacccatcctgcggggtgggaggaatatatcattgttccccttgaggtgcccccctgcgtgggtcacttctcccgctcaccaggcaacacgggcatcttctttgcctccggagagcctttgccggccattcacttccaaggctttcttatttccattcctcagtcaggagacgaaaaagatgaggccacggctgccccttctgtttcttccctgcgcactttggggtgaagtgatggggtgttgttggctcaggttgtaggagagatgaggagcctccgcccagctcaaatcttcctttttgttccttagagcctgcgttttttgaggtttattatgtaaagccgtgccccttttcctgttggatggtgaagttccttccttctggctttaatgtttcccccttgttttattaggaaaggaggaaaggaaattcagttatagtgaagttctaatctgccatcttaacctggagtttggcttttttcttgttctgtgttccttttgtaccttacttagatctcggttaaatgaaaccatgagagaccgtggcctgcccaaggaaatcgtgttaagtgctcacttcactgcgggtcagaaccccggagtgtttcacccatggaaatagtcagcagtcgccacatgcagggtcctcactcactgctggtacctttgtgtagtagttactttgtattttacaatgtaaattaaaaaaaaaagttgggagaggaagtgaaatctgatttggctaaattttgtaaacaaagatgttaccaataaaacctttttcccagtgtataaataatatgtggtccaaaattccttttaaatgtcacaatacaaaacttttccaaaaccccaacattagtgactgacttcagtatttttatcaaagttaaatgagccaaacttattttttacaaatttctggcgcattcatgattgaaattttaaatattctcctagggaaaaacgagggctgattgtccttttcaaggtatccatctcatcccacttgttaaaaataattagggaataatacagtttgcagattttctcccgatgtcatcatggcactcagtaacaaggaatattgtagatgaattttgaaaatgtttttcctggaagagaatcccaaacgtgtggccgaaagggacccaggacctgccagccatgctcctcctgtctttctcccttccagtctgaaccccacagcgctgggcggttgacgaggtgtggccagcttgcatctgctgaaagaaccggggtggccccactgcatcttgatcagacactgccatgaggtccctcccctctctgatggcaaagggaaacagtgggctctacacatggagctttgaagtcaagagtcattttcatccttagctcaggcatgaaaaaaaaaaaaagaatagtaaaaattaaaaaccctttaaaaagataaaaatcaacagtaaaaaatgaaagttacagacaggtgtctgtctttttagtttcctaagcacagtgatgattattggagctaaagacagaggccacccttcccaagtgtgagtggagtaaggataagatagtcccgcctctctgcctgtttgatgttggccctgtggatgctgcaaaacgcagcaaacacggaggctgccggctttgtttctgtagggcttgtcttagcagaagttcacatggaagagaggaggcgtaagaagcagtcagaacgtctggattggagtcttggtcctgccgcgtgctggccgtggagctcttgctctgtgtctgaactccttttcctcctgagtggatttgggtgttgccagtgatgtttgcgtcataagatggggtgagggctaacggagatgatgtgggaaaacaagtgctttgtatcctgccgcgcactggccgtggagctcttgctctgtgtctgaactccttttcctcctgagtggatttgggtgttgccaatgatgtttgcgtcataagatggggtgcgggctaacagagatgatgtgggaaaacaagtgctttgtagacgatggcgttggaaggcacactgtcgttgccatagctgtcgcttggaggactgttaatgatacgttgatagctttcagttcaattagccaaaatgacagaaatgccaaacatctgttgcaatgttgactcccaaaagggccctttttttggaatgggaaaattcagttttctctttattttctttttcttaaagcagaaatgacagcatagatgatctccctctccgacttgtctctgtgtagactgcacttgtgttcaagaggctccgctgtagctcaacctcgcgtgagtgcagaaacttgaaggaacccagttgttttacttcccccagcaccccaaatttaaaactggctctcacattgtgagacagcattcagaatagtaatcgtgaaaggctatgaggacttagaaaaaggtatttaaaaaacgaaagagtgtagctgtatccttttcttcctggtgcgctgttcattcacggtgaacgcacccacttcagcatcttggtggaaataactcagttccaccttccatatacttttctctctgcagtgtgggatttagggagaaattaagacctcgactcgcttatgaatacaagctcaagggcaaactaaggcacccagcgcagtttccacatgttctgggaaccctgaacacttgccttggggtgaaccagaaacctaatacattgcacattgcacttgaagttgagttcagacaagaagatgggaccgctgtatccccaagtagctcgggcgaggtgagagcactccattctgcttcaaactcagtgcagaaagccaagcccagaagggatgcgggttccgttctcacctccctctgctctaagctgaggattccaggtgatgctgtttacctcctgtgatatccttgtgtcctggggaagcacagatttcagtgagactgggactctgttttcccctctcactgagatgcggtcacagctgcccagcgacctggttccaccttagggtcaggcagctgcgaccgatctgtctggttcctcaccctgggggtgcccgccgttgggaggtgctgtggttccagggtgggcgctggtcccttcccacggagctcgcctagcacctgttcacaggtgtgcctgggccagatgcatgtctgacagggacatcaggtttggggagactgaaaaccatttttgaaaatgaagttatgctgatgtcatttaatcgtacgtcatcataattggcagcagagaaggttgcacatcactcatggcagatccattacatgggccatgggccaagctgtgcaccaggtgctgggaggataccggtgggcgaaccagacctgcaggaaaatacatggaaatggggacaaaacaggcatttcagaagctacattcagcttgaaactggatgtaaaatttgatggtatcctctaaaattctggtggaaaaaagatctccctttgggaggctgaggcaggtagaccgcttgagcccaggagttcgagaccagcctgggcaacacaatgaggccccatctcatctatccaggtgtggcggcacatgtccgtggtcccagctactcagggaggctgaggtgggaggatcttttgagcctaggcagtcgaggctgcagtgagtcatgtccgtgccaccgcactccagcctaggcaacagagtgagactgtgtctcaaaaaacaaaacaaaacacaacacaacaacaatgaaaaatctaatgactgggatgagatctgatgaaatggtaggttgaatttaaaatggtgcaagtggtggtgcctgcagagtaccagcttgttgccaacgatgctgtcatcctaaggctctccttctgtggttaaagtggttcaagtgtagaaaatgaattttaaagtgttacctacctgccagcccagacttctcaaggcccagtggtcctattgagctgaacctgctcccatcagtagtgccctgcgggaccttttgaaaatctccccagtaaagacattcttgctttcatacaacctggctgctggagcacctggctgaattttatcttattattcacctttgagttcgtggcaaatacttagcagtatttaatttttgctttctgatttaagtgtaatacgaaaaaaaatcatgcaaatcaattaccagtatctggtgtttgaaattgtaagatgctgaaaagaactgttaattatactctgtatctgccgggggaatgtaaactgactttaggattcgaagagaccttgctgatgagagaaggaatcactgctccttttagaggcaatgaaagttgggcctggagtcctttgcttgagatcacaaagccagagacttcaggagagcagaaatgagaaggctcagtgccctcctagggaacctttcgtaacttgaatattgtgattcagccacctggaagcttcacttgtgaacgtgactctgcaaaaacatgttagaggaagcaaaggagaggatggacgtgaaatccgtcctatgcatgctcacctgacatgcaacagggagggtcatctgccagggcgtcacggtcattccacgagagctgggtggtgacgctccccaagttcccactcctggagaggtaggcagcgagggacactggcgttgcagggcccctgggacaggctccactcctcccttcttgctctggaggtgacacagtctagggatctagtgaggaatgggacctggggccagcgtgcttggacaagacgaagcctcatcaaagttgaaccttagggttcatcaagcagggagggcttccacatacccttgtatctggggcaaccatcagagggcagggctggagctggggccctgtagggcactcagcgtccggagggcacagaggagcacatgtggggctcaggacacagggtcgggacggtgtggcggcgaggtccctctggctgtgatatatgttaggggaaggagggactgaggccgggagtgggcacgggcaggcaggaaacttgtgcagaaacctagcaaagaagtgtgggtgatttcaatgaatgtgaggggtagggaagggagagcagagggagattaaaaacacttgggggtgagataaatggggcagggatggtgaggatccctgtttgctgagctcctctgtcccaagcagggttctaagagcttttcatgcattaactcattaaggaaggctctgtttaccctcatttcacaggtgaggaaactgaggcatcgagcagttgagttacgtgctggaggtcactcagccagggagggctcggcagggatttgaacctggtgggctggtgcctggggccacacacagaacagggtatgaaggagaagattcttctccaaagaaagaggaacagatttccttttcaaatgttatttttctttctttctttctttcttttttttttttgagacacagtcttgctctgtcacccaggctggagtgcagtggcgcaatctcggctccctgcaacctccacctcccaggttcaagcaattctcctgtctcagcctcccgagtagctgggattacaggcccccaccaccacacctggctaatttttgtatttttagtagagacagggtttcaccgtgttggtcatgctggtcttgaactcctgacctcaggtgatccacctgcctcggcctcccaaagtgttgggattacaggtgtgagccaccgcgcccagccttaaatgttatttttcttaaaacagtcaaattcaattcacatcaccaagatacagcaggtttccagcatctctttttaaaaagtttttttaaagggaaataatactactatcactgttgcagacttttctgtcgtaagcaggcttattcaatgttaaatacgacttttattaaagcaggttaaaagaaccttggcagaaatttcaaataagactgggtcgggtactgttcagggtgctttgtgtcaacttattactcctcgcctgctaggacatcatcccctttgcatctggggacactgagatggggcgaggtggggcaagactacacagctgtatgtggcagagccagggttcaggcagagctaggccagtatcggggtctgggggcgaccgtctgcagcaccgtcacatacgtggggacgtccacctgtgtcagatgtttcccagcttgtttcatgatgacaacagctctgctagaaaagcatttcttttttgcctacgaggactctcgattcagggaccctgagtctttgggaccctcgtgcagctggggctcaccctgtctggacccagcggcctgactggcctggatgtgtcccctgctaacgggcctcagcctgaccatttccagtgggccctaccgtcttgtttcagtgactggggggacagcaaaatgagagtttatctgctttaacatcaaaaggttttcttcattgttgtgttattgaatgaactgaacagcagatttatttgctttagcaaatgcggctgcctgtgatggtggcataggtgttgagtgtgagcacacgagcatggcaggagctcgcgggaacgggccaacgccccactgccccagtcagccctctgtggcctcagagggtagctgcccgtctggagggcctcggacactttcaggctgggatggggactctgattttttgcttctcaggcactgatgtggttcagacccaggattctaggagggaaggttcccgtcgcaggggagggaatcagacgtcgctctgggcggcagtggagctggcaggcagcctctgggctctggcagcattgtcctctgggtccagcgatttggggtttagacagggtttctggacggcatctgcacagaggagcggaagacaagagctgggaaccgatgcgtgccttccctctttaaaacaagagtttcgaatccccatgagggttccctagcgtggtctcagagcccaggatctggagggggacgtctgtcattggagaaggcagaggagccagggtggaatccttcccgctgcccagcaggagcagggctggcctagcgggccgggctgggcactgcagcaaccttgtaccatcccctcctgagagcatcaggggccgggacgtccaaggtagcaccaggcccctcatgcccgcaccccctcctcatggtcacctctgttcctgcagggtcccggtggtctcccgctaaccccgcgtggtctctaacgcctcctgtcagccgctgctctgctgtctccacccgtgcggaggtcccatccagtagtttctgtctaacccatgtgtagtagtgaagcgtccctccctaattgtggcctgtgactctggaaacaccattctcatgatgttctatgtctccctttcaagaactgggtttctcttgaggagaatacaggttctcggccctgtaatttaccaagaggttgcagatcaggcacctgttaagcatgaaaaatttgtttcagttttgtgaacccaacaagagaatgacaattttaatgttctctgtttcccagtgagtgagaattcctgaatttacatagaaagcccacatgagaagtccacactaattggccacgagtgtctggcattgcgaaggaagctgtgccttccaactggaaacgcacaggggttcttaaagacaaacatttaaatctgagttcggctctgttaaaattcagcatttgctggcaacatcctaaatactcagttgcctccagggcgacagcctagggtgtatttttccacaagcgaagcccacgtctgtctgccctcctcactctctgttgttctcgtgtaacgagatgttttgtgtgtgtggcaggtggcaggttcaagaaagagattgtcgttgatggacagagctatctgctgctgatcagagatgaagggggccccccggaggcgcaggtgagtatacatgcatgccccaagcctgctttttttccctttgttttctaaggtttgattcaagaagtgcttctagaaatcggtgacttggtttccaaaaaagtggaaaccccataaaaaatgtttcctctcactgcatttttttctcatctctaagaagctaattctttttttatttttttcccagactaaatcctgcagggaagttgggtttatgtgatggcttttcactttctgtgtttttaaaaaggcaggaaacgcacactctgccctggttggggagcccagttgaaatgacatctggaaatttctgtcgtttggtttgttttttggccttttcctttgagtggtttgatctctagagcagtgagagttagagagcttgctgggtgcaattgggagtcccaccttctctctgtctctggtaactacaggcattggcccctctgtgccgccctggccttggcccaagcaaggcagtctccaccgaaagccggtatgaagcatattatgatttctttggaagttcctggaaagatggtcattctggaaataacaaaacatgagtgtggaagatctctttttttggtttatttaacctgctttgttttacttacagcataatttaccagttaagcactttattattattgttattattattattgttgttgttgttattattattattgttattttttattatttatttattttttttttttgagacagtctcgctctgttacccaggctggagtgcagtgacgtgatctcggctcactacaagctccacctcccaggttcaggccattctcctgcctcagcctcctgagtagctgggactacgggcgcctgctaccacgcctggctaattttttgtatttttagtagagatggagtttcaccatgttagccaggatggtctcgatctcctgacctcgtgatccactcacctcggcctcccaaagtgctgggattacaggcgtgagccaccgcgcccgacccatttaaacacttcaaaggagccgagagctggtaacggctagtgacctcaaatgcaaacggaatgtcagacattttcttggcattatttcctggacttaacctttttgtgaacgggcagcataggattgtaagatggagaaagtgaaagatactgaatacaggacttcttaggcctcaggtctagtactccacaggttggagggctgtgcggttatacagaagatgccacagatttgccatgttgcattgactctgaccattgacagtgaccattaagatgtaccagtattcgaaagaaggatgctgccaattaaactatgaaacagccgcaataattaggtgcattctgatttcaaagctgttaaagtgtgtaacattttgtttcttagcattaacgataccatgaacttgatcataacaaggaaagaccttgaagacgtgttaaaagtgaaaacttagttacaaagcagtttgagcccatgttcagtgaccgtctggtagtttatagtatggcagggcaaagttagaggtctgataggatcctatcagtcagatgctgataaaagtcagctctttcttagtcccactgaatgtataggaccgtgtttgttctgctacaaaggaactcttggaggcaaggtccctcctgtggctggtgataggagaaagaagtaggtaacatttagaatcacctgagttgattttccgttttccccagcacataaatgttttgagtgactggaaacaagcttttttctccacaactgaagagcaagtcttaccagtatatgaagcacaaaagcttaaatatagagaaaaatctacagaagaggctaggtgcagcggctcacacctgtaatcccagcactttgggaagctgaggcaggcagatcacctgaggtcgggagttcaagaccagcctggccaacatggtgaaaccccatttctactaaaaatacaaaaattagccaggcgtggtggcacgtgcctgtaatcctagctgtttgggaggctgaggcagcagaatcccttaaacccagaaggaggtggttgcagtgagctgagatctcaccactgcactccagcctgggcgatggagcgagactttgtctcaaaaaacaaaccccaaagcatagtttcagttttctgatggtgaacatgttagattggggggttatttattgggtgccccccacacaagttgctggggaagtcagaatgcacccttaggagatgagagccacagttcacgtttcctccgggtggatgctcagatgggcttcagctcccggctcgggaactgaggtctggttccgggtcagccagtactctttatgggcgcagtgggagtctgctcctcctgctttcttagaagagacaggaagagcctttctcaaggcagagaagaggaaaaggagatgccttccgtcagccttggtcctggcactctctgtgggagctgctatcacgatcttcccaggtctctcccggccttctttgttttcaagtcctcattctcatttaattttgtatttatcactagaactttgggttaagttttaccatgtacatgttttacatataactgaatgcacttttcacttacatgcagaagtcagagtttaacctgttaaaaacttagaccaaatgtattagaggtgataaccttggccataaaaacctatctaggaactacagcttcttttagggaaagcagacgggatggatttcggttttgtttttcaaatttgcacttggaaagagaaggatctttgttgccagatagagctgatgtcagatgtgctgcgctggttgcagtgagtgtgggaagtctctgccctgcaggcagcctccactcactcagctccagttttccaagatggctgttggtactaaatgaggtactagtatatgcctgacagtgtgggtatctgtcaaaagaggatgtgatgtaggttcaactggcaagacaagaataaaatgaatacggcaaagcaagaacaaaatggcgagagtgaggctattgtgaagttttcttccctaagttttgttaatttccctgaaaataagtagtcatttctttgcagaggtgcagcaggagttcagccaaggatgagcctgggttgaatctttacccttcaacagagtaggccagccgctgcggtagcgagtgggaaggactgaggggtggggaggttctgagcaggcatgaggggtccagcaaggcttccttaagaggttgagagtacagtggaaagccttagggcttgaggggctctggcaggaggtgggtctggccttctgtctgcggggccgccttggcaggtcggggcagcgggcggacaggccaggagcatgaggaccgcggggacactgtgtggtttgtgtcctctgaagacagagtggcttgggtgggaacaggatgaagggcccattcccaaggggaacaccaggcatggtgtgctcaggaggaggacgtggatgccgtgacagtgtgtaaaagtgacagtcaaaagtcaagcacccagtgtgtgaccgaggggattcctgcagccccctgctgcctgccgccatgcagacatctctgttcttaatcaagcctgctcactcagctcctgctctcctccccttcttctctccctagtttgccatgtgggtggacgctgttatatttgtcttcagcttggaggatgaaataagtttccagaccgtttaccactactacagtcgaatggccaactatcggaacacgagcgagattcctctggttctggtgggaacccagggtgagtgatgttcgtgtgcagattgttttgaaagggttctaacagttacatattttcagtatggaggagtttaaaaaatgctttaaagaaggaaaaattgcctactgaacgctcacttttttgggaaaaattatggaactgaaatgatcacatttcctgatttgattctatggtgaaaccactcatttaacaacctgaaaacaacacacacacacatatcccaggtgctttatgaaaaataaaatctattttcccttgttttctggaaaaaaaatatatatgtgtgtgtgtatatgttttgtatatatatagtcaaatacatatatatattttctgctatattttaattctctgttctataaaatgatttataaacaatctattaaagcttatctttcagtgcaccttgaaaatagtgctgattttgaacatagagcagttctgtttattaagttctgtttgtcaccgtcttatgatctgtatcttatttttaatctgacaggcccctcagacagagaatccaactgggcacatttcttgttttctctgagggtcacttcgaacttggtctcttagtggagtggccgtcacatggcctgagacacaatgtcctcgctcttgatcacagacctatggttgtgctgggtctgccactagggtctaagatgtcacgtaggatgtttgtaaaagtcagatggaggttagctttacaactgctttgtcagaaatatgggtaacatacaaataatcctatcaggaaaaattgtatatcccttcatttttgttgtggctatgaatagactgttttgcgaattcttttagaatgagcctatctgacatgcccatccatgctctgatgtgagacgcttctctttaggacgtcagctgtacatactgcactaggtgtggtctaagtaggaggttgcccaggcagatgattggctgcttgatcacgaacctacaaaagcccagataaatagtgtggcataaaccacaaacattttccagccagacgtggtggctcacgcctgtaattccagcactttgggaggcccaggcaggtgggatcagttgaagtcaggagttgaccagcctggcccacatggtgaaaccctgtctgtactaaaaatagaaaaattagccaggcatggtggtgcatgcctgtaataccagctgctcaggaggctgaggcaggaggatcacttgaacccaggaagcagaggttgcagtgagctgagatcacgccattgcactccagcctgggtgacagagtgagattctgtctcaaaaaaataaaaagccgggcatgttggcgggtgtctgtaatcccagctacttgggaggctgaggcaggagaatcttttgaatctggggagatggaggttgcagtgagccaagatcgtgccactgcactccagcctggtagacagagggagactccatctcaagggaaaaaaaaaacaaaactataagtatcttttcagtgtgctagatgagagatgttagagttgggcttcctggagagcacctcccccaacttttttttttttttttttttttttttttttttttaaagcgtacgtggtcgctctcactcctgaaaccttcagagccagagctctgtttaatcctaacacagaagggaggagggattcttaggcctaatgcaccctctagtgttcaccaggagacaaggccgcaccacccaaaagtccttggttcttgtgagaatgcagagttgccgtatttgaggtggcatcttgaaaatgcctaatcgtgttttaaagtggatgctcatccacagcagattctgcttaaagctgccttgaagtcgaatagagaaattccgaataagctccccttcctgcaggcccgaccgtggcatttttgagcagggtccttcggggctgtgtgtgcagacaccactcacaggctgctggagctcaggaggtttgactttaggactcagaatgggcttttgcttagactcactgtgaaaagtgacagtgaagttcccagcctggaaagatcccctgcgatcaggttctgttctctgagttctgagtacacatccatgttccatcagtaggaagggagtgtctgagatcccgggagttgggaccacacacacctgcgtgtgactggctgctggctgggtgaccttgacacctgggactttggtggggttcaacaggaattcccagaagacactcagtgcatccgtgggtatgtgataggcatcttaacaatggctgcttttgttcctcatatttcaatctgcgaccagtgttccagggtcctgcctggaatcctgaaccccaccccccactgtccctgcccctggaggcagcgtatccctctgagtctcctgcctgagccaaggggcacatcgagcctcctgccagggtggctgcttagattctcgagaaaccctgatgaagttgaagtccttgagtaaaagaaagtacccccatttattcccatgaattccatgaacatccgttgatcggatgtggaaagatgcccaggaaggccccaggggagtgtgtgcgtgtgcgagggtggcctctggggttgggaggtaagtcagccccacaccctcccggggtgaacaggtaagctggccccacgccctcccggggtgagcaggtaagcgggccccatgccctccctgcaggactcctcttagctgggccacccccagatgaaccagaacgaaaagttgcaatcagggctgtattcctcacctgcgggattctcttggtccttccctagacttcagggagcaccccagaaagcctgatggcaggaagctggcatgcacgtgggctctgagggtccctgccgcgacgcttgcttcctgcgtgcagacttgctctccgtgaagcccgtgctcggctgctctttcaggggtttggcttcctgggatgccagagacaaaagagggatcaggttgtctaggaaggcacctggcatttctcttcctgctgctttggggtaggcagcgttagaggtcagagcatatgggatgggaaagaacggaagaggaattaggttcattgccaaaggattcctgggctggggtgaggcctccgcccgctggcgggaggggcagctctgccagcaggagctctttctgggcagtagccaaggactgcacgaatgttcataattgggcaagatgggaatgaatgaggtaatcatttaatgtttgttaaacaagttctgttttaaagacttgcaaattaaattgatttgagggagaagcacgatctgtaaaaagctacggagttaaaagtggaatgaaaatgagacaggtatagaaccgaaatgcgagtgcagaagcccgttttggtgcagtggcagagattcccgtggtgcacctttgaagccgaaatttgacagaaaccaagcgagcatgccgctgaggacggaggggctgcgggattgctcggccgcaggtcagggtctcatggaagctgggtggatgctatgtggcctgtgttttcaaaattatcctagagcattgaaacatcatggacttgtaacttctttttacaattaaaaagaaatgtttatacttaaaaaaaaaactttcttttcttaaatgttgtgaaatgcaagtcagatttactaatcagcaagacaagaaggcaggacgaggtgccctttgaccgtatccctggaacgggggtgcagcctatggaggctgtagtggtgattgtcagagaagaaacccttaactgcagagttcacttgccttccagtaacgaggaaacgtcagcccaaccctatttcatagggctaagaaaataacatgagaaaagagaaaagaaaaaactgaataaattcctcaggacatcactttttaaatatacttcaaaaaatgaagttctcaaatgccctttctccacaaaaataaaatgtcaaaggtggtcgctctgttgtataactttgctgctatttctttgactggtggagaaatcctgttggtggatttttgtttaaagagttgtttattgttttctttggcataagagccttcaagccctatgaaaaagattcaggttaggaaactgtctctgaaggctgggcgcagtggctcacgcctgtaatcccaacactttgggaggcccaggcgggtggatcacttgaggccaggagttgagaccagcctggccaacatggtgaaaccccgtgtcgactaaaaatacaaaaaattagctgggcatggtggtgagtacctgtaatcccagctacttgggagcctgaggcaggagaatcatttgaaaccaggaggcagaggttgcagtgagccagctcacgccactgtactccagcctgggcgacacagtgagactccatctcattaaaaaaaaagaaaaaaaaagctgtctgtgaaaagtcctctctcctccctaagccctgtggctgttcacattccagctcctcatttctctgttccacgtgccactgtaactcaatagtaatggaatggatggggcagggctgggggtggggaatcctggcagctgagcttaaaaaaaaaaaaagctcagtttcttttttaggaaactggtgccgacatccctgtgcagctgctcaaacgcccccgtgtgcacacatgacttagattggggggatccaggtcacctgtgaccctgagggggtccatcaaaacctcaggggactcgctgctcccctctccacacacctccctcccacccctctaggcctcacccctacatctccctcatatacaccagctgtcctgctgccctctgcctcaggcgttctgccccaggcagtgcctactgcgccccacctgctgcaggtgagggttccctgacctcttgctctaaaacccagagtcacccaagcctcctgacctccttcccggcatcagttaacagtgtggccatcttacattcagaaccattcatcacattcatctttcttttctgcttgcctctctggccaactagaatgtctgtttcatgagagtgcagattgtgtctgtttcaacaattcactggggtatccctgtgcatagaacagaaacaaaccccaaatgggggctcagtgagcatttattaagtgcgtcattggacaagtgaccacacctagaagaagaatgccagtgtagggagtatgcttagccacctgcgtggtgcacagaagggggcctgcacatagggactgtgtgtgtggtttttcctcctttctaaagtatgtatcctctagacccatatttaagtctttttccttctttctgaacattttaaaattgcagtttcagaagcgctcctgtaaaacaaatatctacgaatgaataactttctcttgtgtttgagtctcttagttgggaggcaaacgatgctctacaattccagattcataaactaattacatttctgctgagtaaggtactggttttccgtgttgtggggagtgtaggaagtatttagagctgtcattgtcactgtgccgttactttttggtcttctgttccagatgccataagttctgctaacccgagggtcatcgatgacgccagggcgaggaagctctccaacgacctgaaacggtgcacgtactacgagacgtgtgctacatacgggctgaatgtggagagggtcttccaggacggtaaatgcgcgtggctgggagtttaatttcagttcatgatagacgggaggcacttcaagaagtcagtcctgcctgcacttgtgcatgtgggtggtggaaatatgtcgttgatgggtgggcattagtatcgagagcagtccattccagaggcaattctcaggtatgtttcatataaacagtgctgtgttcagaagagacaacaaggcatggcttgagaacagcctggtgttgggtctgtgtgtctcctatggggcctttttgtgtacaggatagaacatttcttgagctgttactcatccatgtgctctgtaaaacttgtttgtgagcatttctttattgtaattgcccattcttaatccagtcccgtcctttaaagcagtttaaatatttgatattaggctttgagaagagaactgaaaggaggagagagagagtcaagtttggacctccccccaccaaaaaaataataaaatgacacgataccactcacagcagagggtgaggaccagccttttggaattgtttttaggttattttattcattattgatcacctaccttcaggaacagccacaaatcagacagaaaattctcctaggagagcatgaggttctgcaagagggtcacatacttgtggatgatcatagcgccagacgtcgtctatgagagaggagcctgtgcagatgcgtggggtgggcgggagaggtggcgtcaccctggggataggagggtctggggtaaataaggactgatacttctaaagccagtcttttcaagttggaagcttgggagaggcatggttctggcagagggtccccttgctggtgggagtggtggaagtcacttgtagggtcctctccccttctggtttaaatccatgggggcagagccacctgtccccctgctctggtgcccagggggttgtcgggggcagagcagggcagccacactcgggctctccagagagtgctggagccgcttcaaggtgatggaggactcgccgcgctctgaccttgaagacccacggtgaaagcagtggctgcaggactgttcccgggacttcctccaaatggggcaattttctattacatgtttaaattagtcttcagatgaaattgtagggattctgtacattcactgttcaactcagtttcaaagatgacatcagttctcaaacttcacattttctttcctggagcagtgaggttcctttctaagcctgccgtctcttcccgcgcatctctgcctctcagatacttacctgtttttcagcacgttggtcctagttactgcttcatggcttaggtttcttctcgccttatccagtgccaatgctgaagaagcgcagggtcccctgaggatcagcacaaagtcgctggggtcccacagccccttcttccctccactaacgtatatctcgggcacctcctgctgcctctgtcgggagaatgtcctgtggggagtaaacctcatttcaagccgtgctggtgaacatgagtgagatgttagtgagacttggaagaactgtgcagggaggcccttagagctcttctgagaggtgcaccctaatggagcaaggtcactgtcggccgctgcgctgccgaggcccctgtgaatgttgaagtaaagcgtcgtagatgaagggtccccaggcccgtgcatgaggccagctgcctgttttcataaatagacttttcttcttttttttggagacagagtctagctctttgcccaggctggagtgcaatggcgtgatggcagctcactgcaacctctgcctcccaggttcaggcaaatcttgtgcctcagcctccccagtagctggaattacaggtacacgctgccacacctggctaattttttgcattttagtagagatgggattttcaccatgttgcccaagttggtctcaaactcctgagcccaggcaatctgcccaccttggcctcccaaagtgctaggattataggcatgagccaccgcgcctggctgtaaatagacttttcatgacgcagagccacgctttgtgtcgatgggctgcagcgggtttgggcccctctccagctgtgacagcagagatgagggtctttgcggcctgagaagcccagaatattcactctctggccccgtgcagagagcttgccggtccccgatgcaggatatcagggactcagttgtctggataagtttagtttccacagtgactcctttgcttttgtatttatcacggttaacatacatgagttttccataaattgatgagtgcttcttataaaaataatgttgtcaattaatgaatactgggggttgtcaggatgatgctgccttcctgccaaacagcctttgtacgttctggctgctctaacaagacccagtggcttatacaacagacttttacttgtcctacttacggaggatgggagtccagggccaggtgctggtgggtgtggtgtctgctgagggccatcctcctagtgggatatgtgtttgcatagtggagaacagaggacacaagccctcgccagtcccttcccataaaggcacttaacccatcacagggttccacccttgtgatcagtcacctggcagaggccccacctcttattcccctgggggtcaggatttcagtataagaatttgggttgagttccataccacacccagcacgttcaaggcagaggacaggcagccacccacctctgtgttggaagcatttcgttttcttcaggttgggggtggcaagaggagaataaggactgatatttctaaatattagtttaaaatattcagaaaaagcgtttccgttactgtgacagctcatgtcgcacctccccaggtgatgctgtgatgagtgtccgttttcatgggcacaggagatttccgttccagtttcgtattatagaaataatacactctcattatgtattcggattttggctgggcgcagtggctcaggcctgtaatcccaacactttgggaggctgaggagggcagatcacctgaggtccatagttcgagaccagcctggccaccatggcgaaatcccatctctactaaaattgcaaaaaattagccgggcatggtggcaggcacctgtaatcccagctactcaggaagccaaggcaggagaatcgcttgaacctgggaggcggaggttgcagtcagctgagattgcacaattgcgctccatcctgggtgacagagcgagactctgtctcaaaaaaaaaaaaaagtaggattttatggaatttgaaaagcaaatacctgtgaagctacaacttccgtgactattgcgatttttttgtccttaaaatattttcatatgaagataacatttttaaaataaaatcagttactttgtatattttatatcatagttatatggtatatggtttcttatttgtatatgtattttcatgtaaatcacaaacactctcattgttagtgagaaaagtagttgctgagtaggagctttattcagtacttagcaatccttaataacaaagtaaaaatcctcaaggaaagttaaacattgtaaggtttatataaagttgaagaaattgaggctcagagaaatgacatagcttgacccaaagggacacagcctggactggatcccccatcttgggacctgagagcctcgacttaaccacagcaccgggacattttgtcattaaaatggaagcaaatcaggtcctggggccttaagaacacaccagctttgcccacaggtctggggagggccttgcaggggatgcacccagccagcagggcccctgcctgctcgccgactcagtttattcacatttcttgataactctctggcttcttttttgccctagggcttactttgtttatttactttttatacctgtatatggtagaaagaaaacataaaggaaaagcgtgtaatttctacataatgtttggcttgtaaataaaaaaaaaaaaaaaatccagctgcttccattgccctgcggaggccatgttcctgattggctctgtaccgaggttcatttaaaaggccagggacctcattctttcttctccaacatttgacttcttagtgtcttgtaacaaaaggacattgtaaaaatgaatggagaaaccttgcattcactttttgttcgcttgtgtggtcctgtttactttgctttcatggagtttccagatggctactggcaagtggctgtaggtgttgggaagcagcctagcaggctggttcatccacccagtcactcgttcatctgagcaccagcttcccacacactgtgcgtctggtcaggggctagaggcagattgggaagcgcaggcagggtcccttcctccgtgaagttaaggtccactagggagggtaaacatcaaacggtcacccagaaacatgaccttgtgtcttgctcaggggtggaaaagaagtgtggcagcccaggctgctttctgggggtggagcgttctcgctcctgctcacaggcgagtttgtgtggcttgcggggctgggtgagctggttccacaagatggtttctgcttgacctgggcagctgagccggacgtgggctgtgggtacccaaccgtttggattctcagcagagccctggggaagggaggcactgggggctggggcgggctggatgtgcggacttggcagctgggggctgcaggtccgtctgcagggactgcacagggctctcgttcctagattgcttcacagccagcggctctgtgcctgtcagattctgcatggctctgtttgcctcttcctgcaactgggaaataacctatatacaagtttttctatttttaaagttaaaatggtgatttcagtgtttggcattaaatttttcaaaagtccctgttgatttgttctcctagggcctggatacatgaacatgaaggattacagaaaaataaagttcattccatgtagacattgttcctctggtcctacgatccctccccttccccttcccttttttcgaggcagggtctctgtcacccaggttggagtgcagtggcacgatctagactcactacagcctctacctcccgggttcaagcagttctcctgcctctgcctcctgagtagctgggattacaggtgtgcgccatcatgcccagctactttttggctatttagtagagactggtttttgccatgttggctaggctggtcttgaaatcctggcctcaagtgatcctctggcctcggccttccaaagtgctgggattgcaggcatgacacactgcacccagcttgcgattcttctttaaagagacatttttcccacttcatatgaagaagcagctttctgagtggcagcaagcagctcttctggacagacagagtgtgtgtctgacatgggactgtagtcaggtctccggaaggtcaggaagggtatagttttggtgatgggatttttcagcctacatgctgaaaggtcacctaaaatagttataacttagtgacaaaaataaatcctcccttcagaaggccaagtcatgttcaaggtggtagcaagctgtgtataggtagcaacagggcccctttgagcattacacgtgcaccttgggaggaagagagtggagagcgggctctgcctgtatattcttggagatggtgcattcagcactgtcgttccctgcagttaggttttggagagtgtaaattttagcctgtcttcaaatgctttgagtttctcgtcttcctgagtagcgtgttcggagctttctctgctgcgggtggcggtgccacagaggaacacaggggcctgtgttgtggcatctgttcaatcggggagacaggatcagggtttttttgttggttttgacattcttgagccaatgcaccctaacttttattgggcatagtttatgattgttaaattatggtgtctttgtggtagctgtatggcatgtgggattttaaaggcccctgattcctaaagaaagaggggtttccctttcataggcaatcaggagtacaacctgatagtggtacaaagaattgttttcatttcttctccaagcagctcgatgccctttctctcttcactccccctctcctagaatgagctgataaagatgtacgtgagtggtccacagtgtggttttatgcatggattgtttatttgcatcccagcatgttttgtatacagcaggggtccccagtcaggctgcacaggaggtgagcagcttgcaagtgagcattactccccgagctccgcctcctgtcggatcagcagcagccttagattctcctaggagcacgagccctgttgtgaactgtgcatgcgtgagatctaggttacgcattccttaggagactctaatgcctgacgagctgaggtggaaccgtttcatcccaaaaccatccccatcccccacctgccccccaacccctgatcctcagaaaaattgtcttccatgaaaccagtccttggtgccaaaaaggttggggactgctgctatatagaatttaatattcttgcatgcattttctgaaccttctagtcacttgttaaatcccagttcagaacatcacattagatatatgatctgcactgtgctaggacgtgctccccaccaaaacgtcagcgtcttaagcttgtattcatatgaccataggaaaacctacatgcagaactttgatagtagttgttagaccaggtcaagatccatgtcaaagagataaattacaaattatcatctctctgcttaacggtctccagggccagtttggtgatctcacatagacttctgtcctagaacagatctgcattattgtggagggagagacagtaggttctaggtgtatgggaaagctgggcagtggcactggaagggcgctgtgtgccaggtgctagcgctcccgggccctgtgtgccaggtgctagtgctcccgggctctgtgtgccaggtgctagtgtggccacagccttgtggcttattagggcttcctctgttcacacgctgtgtacatcgtcctggtggatgggtgtttatctggtagagtagttcctggtctaggcagatccatgtcagtcctttgacctcattgcccctggctttttatgtttgtgctgcagttaacattctggaaagcacttttatagaagccattccatttgtcttttgtcccttcccagtaacggctcacctgggcctatctaacccatgccgagagcccgagctgggagaggttgcatgatttttaccaaggttgtgcgggaagtcagggagcctcggtgtgctcttgatgctttgcttccagagattgaaatcctggtgtgtgcaaagaaccccatctcacattaaatggctgcagctgcctggtcctaattacaggagtgtccagaaccaggggagctatgttaatgagtccgtttgtgcaacctaattgcacgcactagagcatctgtgaatgtaagcagtcttctgggcctcttctcctgggtcctgcatcatcttggaccattttgttttgctcacaccacagtccttgtgctgttaaaggatgtatcagttaagcctattccattctttcctgaaatcagcttaattttcattgtcggggtggcctgttttatgatttgtttttgttgctatttttttctcctttattacagattagattggaactagtgtgtgtgtgcatgcgtgcatgtgtgtgtgtatatgtgtgttagcgagggaatacttcaaaaaataagattttttacacttgaaagcaagccatgtatatgtgtacattaggcacttgatatatgttgaaaaggtggattaatgggtcattaattgtccattttttaatcacttgtagtaatgactaataattatgcaacaatttaacggcttatgatgtaggatagtggatcttattaggcccagtttacagctgggactacattgttggaaatgctgccttcccagaggtacatggtgcagctggtgtcaggcgaggccatcatttcccgtttctacctgtggtcttggctgtgcacctgtactcatcactgtccccgtctctacaccctcaccccctccacacattgaaagtcttatttctaagacttcctgggacagatgggtggtagatgtgtattgggacagtatgaaagaggttcagctgcttaaattacacttcattaagggggttcatatttgaacattttctgagaacaaagatgacatgaagaaagtgacctctgtaaggctctggcagcacttatgcggtaccaatacaaatgggggttgggggctgagcagaaaacattcttcaagagttaaatgatcaagtcacgtaaggcgtgttgtttttgttttgttttgagacaatgtctcactgtcacacaagctggagtgcagtgacacaatcttggttcactgcaacctctgccttctgggctcaagccgtcctcccgccccagcctcccaagttgctgggattacaggtgcgtgccagcacacccagctagtttttgtatttttagtagaaatggggttttgccatgttgcccagcctagtctcgaactcctgagctcaaagcgatccgaccgcctcagcctcccaaagtgctgggattacaggcatgagccatggcacccggtcatataagggggtttgatgctggtttgggagacattctggtgtcgttagccctagggttgttgatgtcattcttttttttttttttttttttttgagatggagtctcgctctgtcacccaggctggactgcagtggtgtgatctcagctcactgcaagctccacctcctgggttcacaccattctcctgcttcagcctcccaagtagctgggactacaggcgcctgccaccacgcccggctaatttttttgtatttttagtagagacgggctttcaccgtgttagccaggatggtcttgatctcctgacctcgtgatccgcccgccttggcctcccaaagtgctgggattacaggcgtgagccaccgcgcccggccctggcagcttcacatgtagggccatccagtgcatgtgagaatctgcagatggtctccagaagagccacatctgacctgcctagtagcttatctcccagcgaatgggagaggtgcagacctgctgttgactgtaaggagacttgattcagcctgttggtgggggcgcacatgtgaggaagaagccttggtgggtttgtgtgggtctttctcttatgccatatccctggtttatatttggatgggaaaatacataaatgtttgatggtgatcatttttatgaaacatgacattgtcaactcctttcttcatatgcattttcgaattcagttcttaaccaaagaagctctttctacaacagggttaaattataaactgaaatagcaaattaataccaaaactaaaataaagctttttgtatagtaaaccatacattcagaggtttaaaaaaatccaacaaaatgaaaaatacttttgagttactatttttagaaaaaaattagtttgggttgaaaaattcttaccctcatgaagctataaaagcacatgttttactgatgagagaagcttctggcacatcaactgagacaaaaatcttccatattcactcggtaaatacaaatacagaagatgggctgggcgcagaggttcacagctgtaatctaagcactttgggaggctgaggcaggcgaattacctgaggtcaagagtttgagaccagcctggccaacatgccgaaacccccctctctaaaaatacaaaaattagccaggcatggtggcgtgtgcctgtagtcccggctactcgggaggctgaggagggagaatctcttgaacccgggaggcggaggttgcagtgagctgagatcacgccactgcactccagcctgggcgacagagcgagactccgtctcaaaaaacaaaaccaaaaacaaaataaatacaaatgtgtaagatagaattcgttatgaagctacaccagacattttcaggagtaatttgagaatgtgcttgaggtgattatccttaaatcatccaagtgtttttgaatattatttcaattatttcatcttagaagtatgaaatcagcttgtttcttgtttagagttgccctttctttttattattatttcttaattgagacaggatctcgatctgtcacacaggctggagtacagtgatgccatcatagctcactgcagtttcagactcttgggctcaagccatcctcctacctcagtctcctgagtagctagcgctactggtgcatgccaccatgcccaggtcatttttcaaaatttttgtagagatgagggtctcgatgtattgccaaatccagtctccagctcctggtctcaagtgatcctcctgtctcagccttccaaagtgtgatgggattataggcgttagccaccactcccagcagcccaacttttaaaggattctctctcagtctatcgcttgatttgcttaacaccagccatttaatatgaaaatgtttaggtgggggagggaatatcttaattatcattgtgctccatacgctacagatggcacctgctggccttagcaatatggggtcaagtatgaaacatgatagagtgacacccaaggaacctataaggaaaggaattttgattctttcagaaataacaggaagaaattatcttaaaatcttaaggttgatgctgcaaacaaccagagacaataaataaattgttatttagtgatgttgcagaatattgtgttaatagagcctgtgatctcttctggcaatttcttaccctaagtctgggatttttcctgctgtgcttctcttactagaaacgttaagtgtgcacagatgctcatacgtgtgcagagaaatgcctgaattaactctcacactgccaacattagatcattaaacacactattagtaaatgttctctattttgattttcatgttaagactcatctcttttgctcatagaattaattttatcaatgacatagaaaatggttattttaatacttctctgcactgcggtatcatagctgtgttttgccccaggacttctctctaatgacttgagccagcttgaattagcgtgatgtatcattaatgcatacaaatggcttttatttttgttcataatctgttcataatgccacggcattctgctctttctaatgtttttaaaatgattaagtagtgatgtactttttgacctagttaaccctccatggaatcgatgatcaaaagaataagagaatattacttaactaggatagtcagaagttgttataatctgtagctgatgttttccagttattttgaagttttttataatttttttttccttagggaatatggacataggccgggcgcacagtggctcatgcctgtaatcccagcactttgggaggccgaggtgggtggatcacctgaggtcgggagttcaagaccagcctggccaacatggtgaaaccccatctctactaaaagcaaaaaattagccgggtgtaatggtgcatgcctgtaatcccacctactcgggaggctgaggcaggagaatcgattgaacccaggagccggaagttccagtgagccgagattgtgccgttgcattccagcctggggggataagaggaaaactccgtctcaaaaaaaaaaaaaaaaaaaattgcagagaatatggacatagccatgtggtccttttttctaagtaaacttcactcatcgaggagctacccacaaaccactgggttagcagcactgaatttgttcacttgatgaaagatgaggaatagtaatcctttttaagttgtgaagttctttaacctcagaaagggtggctttgtctcatggactttgatattttttgcatagtccttgtaggttgagcctggccagacactggctccaagaggatgtgaggaattcaggctccgagcagatcaggggcatccctaaaggttgggttctggaatcgggtgagtttgtgtattgaatgcagagcctcatcgaagcgttgtgacgaggagagcgatgcactgacggccttaggagtctccctgatataagcaaaagtcagctgggaagagtggatttcaactttgttttcctaagagaaaaataggccagatgtggtggctcacacctgtaatcccagcactttgggaggctgaggcaggtggatcccctgaggtcaggagttcaagaccagaccggccaacatggcgaaaccctgtctctactgaaaatacaaaaaagaacttagctgagcatagtggtgggcacctgtaatcccagctgctcaggaggctaaggcaggagaattgcttggacccaggaggcagaggttgtggtgagctgagatcgtggcactgcactccagcctgggagacagagtgagactccatctcaaaaaaacaggaaagaaagatagattgtaaaaccttcagtgagtacgttggatgttgtgaaatttgccaaagagaagaaagatgatttttaaaggatataaaatatggaaataaaaaccactgacaacactgccacccgggggcaatgattgttaaggctcgggtgtgtgtgtgtgtgtatgtgtgcgcgcgcgcgcacacgtgcacctgccgtgtttgaaaaaaatggactgtcatgcattgtgagactttatagcatactctttcacatacacgtggagcatccctaatctgaaaatccaaatcttaaactggaaatgctccaaaatccgaaatgttttgagtgcagacatggcacacaagtgctcacgcagaatttcggattccaggttttcagtttagggatgctcagcctgcaaatattccacaaaaaaaaaaaaattaaaacaccctggtttccaagcattttggacaagagatccgcgaccgtgaaacttttcccaccctgtggttattgatttttgcacggcatttccttgagcaaacagaacagcttttggacccagtctccaattagacatttggttggttttttatccctctgtatttgatttagatgagtgcttccgtgcatggttttctttactgaaagctgtgtctctgtccttcctaatttcccgaggatccatctctggaagtgagactgtgtgtccacatccttcagaatgttaaggctttgaatccttggtgttgactggccttccaggagacctgtcctaattcagcgttctccagcagctgccctttttctgcacctggccacactgggtatattcattttgaaaacctctatcagtttatacacagaagtattatttcatgtaagtcacccccaaatatgaaaataagtccacgtcctgtaatctgttttgttatctgatttcccacctgtcctaggtaggaaaggtgtactcctgaggatgacacgtgggacccaggcagtccttgctgctcttacagatgcgcgcttttggggtcatcaggcggttgcaaaggtgggagcagccgtgctccccagaatgctgacagcacagagcactggtctgaagatctgtgtgtggctgtgatccgtgcgtggctgtgacccgtgcgtggctttggcccgtgcgtggctccggcccgtgtgtggcggttgcccatgtgtggctgtgacatgtggaggcgaacttccacggcagaagtgccatgcttccgtaagctcttccgactggttggtaggcgcttttatcggcacatgagcaccttacagacaaatatctgaagtacacttcaaaggaggcaaagaaaaagcaaaactgccagttccttgagcatggctgtgtgtcgttggtgctctgaagggcttgagaatctctctctacccttcattttcatgcacagaaaccgattttcagggaagagctgtggcccaccacggtcgcttcagcccctccccgttgcccatgtttattccttttctgcctttcctcattgtccatctggactggggatcttggtcacgtagatccatgtttcccaggcacctaaagcacatcccccccactttggtgatcgtaaaaatctgttattccatgtttgaaatatcaggatttcagaactcagtcactgacaggtcactgccacaacagctaaagaattaaaacccaaacatgtctccttatctctgctgcgtcctgagtcggctcggctgcctgcatgttcccacccctgatgggggcacctgggagcgcccgtggggtgggggcatctgggagcgcccgtggggtgggggcatctgggagcgcccgtggggtgggggcatctgggagcgcccgtggggtgggggcatctgggagcgcccgtggggttgggggcatctgggagcgtccgtggggttgggggcatctgggagcatccgtggggtgggggtatctgggagcgtccgtggggttgggggcatctgggagcgtccgtggggtgggggtatctgggagcgtccgtggggttgggggcatctgggagcgtccgtggggttgggggcatctgggagcatccgtggggtgggggtatctgggagcgtccgtggggttgggggtatctgggagcgtccgtggggtgggcgtatctgggagcgtccgtggggtgggggtatctgggagcgtccgtggggttgggggtatctgggagcgtccgtggggtgggcgtatctgggagcgtccgtggggtgggggtatctgggagcgtccgtggggttgggggtatctgggagcgtccgtggggtgggcgtatctgggagcgtccgtggggttgggggtatctgggagcgtccgtggggtgggggcatctgggagcgtccgtgggggtgggggtatctgggagcgtctgtggggtgggcgtatctgggagtgtctgtgggatgggggcacctgcgagcgcccgtggcagctgctttgctttccccatgggtggtagtctcacgctgcccccacaggcccggcccctccagtgggaacatgtgcctgcactttttagtcgaacatgtaaattaatcagcagcagtccagcctaaaaagagaagctgaacactgttcgtttgggggctcatcggctcactgccgcgtggtcagtcctggtgccgtgagcacagccaaccggactgtaccacatgttcccttctccctgggctgagcaatcgcttccccgctaaatgttcggcagcactttgccttgtacgtgtctacgtctgcaggaggggctgtgactcatccccagccaactgtattccaagcacagccatagttcagagtgaatctttatggtctgtgaattctggagtttcagaaaactctctcattcaacgttgtgagtaaaccgtaagaaaaaatattgaacaccaacatagtcatctgggtactgggaaatactcccatgcccgcaccaagatttcattattcaatgaaaagtccaaggtagtgcttacatttctggcctgacctctagatgtgtagaatttcagagctggaaggacagagaccccacctagctcgacccttcccttcacaggtggacaggaccggtcttgtcagatagagtgtttagtagcaaggcaggtgctagaaattaggtctgtatcttttggctgcacagttcgattcttgttttatgaatgtcgtacttagaagccattggctacattaaaaaacttggtagtgagctaaaataaaatgctcctttaagttataattgtttttagtaaaatttaagccattttaacacagggtgcttggattaaatgcagtacgataacacatcgattatttttataagctaactaataaaaattcacagagcgttttctgcatgcaacagaatatgtgggtaacaggacattgggtctgtgacaaggtctgagctagaaggaccgtatggcccatgaagcacagtgtatgcaagtgctgttgtaatttagtaaaccgccactagggggcattgaaagcgcgtctaaggattattctcctgcgcaaatgttttccttttgctgtcaccatggagaatacagatataataaaacacactggtttaagagaccatttagacctgtaataagatacactccgtaaagcgtgtgaagttactggatcagcagcacacaaatgcagaagtaaaaaagtttcattcattggaatgaggaggagaacacaattaaaaagatgaaatgttatattctgtggttaaagaattctacattctgtggttatatattctgtgattttgccctgcatgtaactttacagaagaatcaaagaaaagttggccaaagatacaaagtttttcttttgtatttttttgagaaggagtctggctctgtcgcccaggctagagtgcagtggtaagatctcggctcactgctacctccacttcctgggttcaagcaattttcatgcctcagcctcccgagtagctgggattatatgtgcgtgccaccacaccggctaattttttttttttttttttttttgtgagatgtagttttgctcttttgcccaggctggagttcagtggtatgatcttggctcactgcaacctctgccttccagattcaagcaattctcctgattcagcctcccaagtatctaggattacagcccgccaccacgcctggctaatttttgtatttttagtagaaatgggatttcgacatcttggccaggctggtctcaaactcctgacctcaggtgatctgcccaccttggcctcccaaagtgctgggattgcaggtgtgagtcactgcaccctggcctgatacttctttatagagtataataaatggacttattatttagcccatcattctctcttaacagaatgcaccaagagtttctctggcttgagtgattggccaggcacctcacgttagcgtctgcagccttgaatcgggaggcaggttgggcgcaggcttctcgtgcgcaccagcgagcacccgggccaagcgtggaggctctgcgggctgggggtccggcccacaccatcagcctctgtgcagccgttgctttttccgttgaccaaagccatgaccttacctttatgcagtcgtgttcagagagagatgaagcctcaaaggcaaagtcagactgacactcctgggagcatgacgggagttgatcattttttggaaatgtagatattccgtttacaaatctaagcaccgttaccaagagtggtaagtttctgcaggcagtaggacctttccagaggattagcagctgctgtgttccctgtggggttggcagtgggctgggggcacagcacggatgggattgtaatgtataccatttatcttggtatagaatcttccagtttcttgtctttttttttttttttttttttttttgagacacagtctcgctctgtcgcccgggctggagtacagtggcgtgatttggactcactgcaacctccgcctccgaggttcaagcaattctcctgcctcagcctcccaagtagctgggactacaggcacccacgccatcatgcccggctaatttctgtatttttagtagagacagggttacaccatgttggccaggctggtttcgaactcctggcctcagccattccactcgcctctgcctcccaccgtgctagaattacaggtgtgagccaacatccctggccagagtcttctagtttttgaaggtttttttcttttccctcttagtttttcttaccctaagatagagggcttctccctaccagtttttcgtttgtttattgttttcaccctttattttctctcactacacaaggttcattagaatttgagaaattgtagcatctcatattagaacactttcaatttctatatttgtaaaatgggactaattgtattttcagtacctcaaatgagaaatagatccaatcacaaactcagtattcttcaaacattttctctatcagaatatgtacaaattgaatgtctagaatttataaagattttggagaattttactactttcagtatatagagtagtgaaaatttggcagaaagtcatgagaaaagaagttaagtaaaagtgggtatttcatcagagcggagagccacattccccttaggagggtagctttctcaaagtagtcttttagtgccaaaggacaatgttttaccatcctctaagatgtagggcattctgtggggagccaatgggtagagctggggcccaaggttcaggtgttgcagtcgaatcagtaaactccggcggcatccagggatgtgcacggtgccggggcacattcacagaacctacctgcaggtgggcacggctttgtagagagggtaggcacagccgccgtgggatgaagcctgctcccagcactgttagcggttgacagtgttgtcggggatctgggcagccatgtgggccaggccccagtttggccagcgctgcagcttcctctctctgattcatcgagttcccagatctgtttcttacagaagaagaaacacctgctgccgaaatacagtttgaaaaaccctgatctcagaaataggattcctgatgacagaccttagcaaatattccaataattataccaactgtactaaagatcccagtactcgagtaattcaccataaatgagtgaaaattattcaactggattagaaattgccagccttggatccttttctcagatattttgttttcctgggtattttccctcttctgggttcttagtgcccgtcccccgtagctccgtcacacagtcctgttgctgctaccttggggcccaggcgtgtcttttgtcccccagtgcctggcacggtgccctccaggagtactcctgggattggtggcaggtcatgcagtcattgctcaccagagccaggacatgcctgggctgctgagtggggcgtgcccaactctttctgctttgagttttctttttcctccagtggcaaggtttgcgtggtcttcactcttttgcagaaaattgttggcattgcatcattggcttatgctactaaataatgttttaaggaattggagttttgcgaggagatggtgacaagcctcactcaggtctttggtttctgtcctccttcctgggcaggccctttgcccaaatggttgttaaagaaatgcaaacagttagttgttccgttcatgctgttgcgtgagataagttaggatgctcttgaagaagtttagtgacattcagaggaaatccttccaacacaatatacaattaattgctgtaaaatatcgtggtcaaaatctcggggaggcagtgaaaaaaaaacgaaagcagtgactaaagggcatctccaggtgccgcctctcacctggtcctggatcatgggggaggcacaggcgacgctccgaggcagcctggcttgtgttagctgagttctgctttggcacaggggagggaggacatggccctcggctgccaaggagcatccagtcctttccaaggactttggttttccagagttacacttcacatgtatttctattaagatacacacttatgtatgtttcatatattagcaagtgtatctcatatcttctgaatacacacatttaaacatgtttttgtgattaaaataacttgtttgtaaaaatacaggaaactgtaagacagcaagtaaaaatcacctataatcccacctcctagtaataacacatatatatacacacacatttttttctttctttgtttcttttttttttttgagacggagtctcactgtatcgcccaggctggaatgcagtggtgggatctccgcccactgtaagctccgctccccgggttcatgccatgccattctcctgcctcagcctccccagtagctgggactacagacgcacgccaccccacgcctggctaattttttttgtatttttagtagagacgggtttcacagtgtttgccaggatggtctcgatctcctgacctcatgatctgcccacctcggcctcccaaagtgctgggattacaggcgtgagccaccacgcctggcctctttctttttgagacagagtctcactctgtcacccaggccggagtgcagtggtgccatctcggctcactgcaactgccgcctcctaggttcaagtgattctcaagtgggggctccggagggttcctgcattgcccatgatggatattcacgcaatcataaaatctcctaaagtagaagatttaaatagaagcttaaactgaaggacaaggcttagaacactcagaatcatttcagacttttatttaaactgcttagaaaagctggtggattttgagaaaaaaattgcctttcatggattatcacagtcagtgctaggataattaagctcaaagtggcagattccaatgcttcaggaatgtctgacccctgtaccgagatggtgtggtgagcaggaagatggggtcccaaaagatactcaagttctaatccctggaattgacgaatattatattttgtgtccaaaatataaagggtctttgcagatgtggttaagaatcttgaataccttctgattgggccctgaaagcaattgcatgtatccttataatagggagggagaagggtccacgtggagcagaggagtttgaagatgctgcctggatgttgggactaacatggcccaggagtgcggccgccgcaggtgctgggaggcccacagataactgctcacctgtagtctctgggtccggcatggcccccagcaccttgtcagccaagtgatggcgattttggactttggcgtccagaactttgagaaaattaagtttctgttgggccactgggttcatgggaacttgttagagcagctgcaggaagctaaggcagatggtcagaggcaggccgcctccagagggcttctgctggggagcacggtctccaggctgcgccataggtgcagaaggttcaggtgcacctgaggagccttggggccactctggggctcccaccacacgtgggcacagctgggagcagggcacccccaggaacccacggacctgccacaggatgcagccagggtgacctaaggcatgtgggcgtgcaaagatgacgggcgtggcttttcaactggagacatgccggtctctgccctgtggaactggtggccgtgtgttcacgtgacttgagagctccatctgccctgtctggtcttccccgaagagtgatccccacctggagaggcttagagcccaggaagctgaagcgaggagaggctgtgtgactccggccgttgtggtgggtgctcatctgcgtcagttacatcttgtgcagtcaggggctccctccttccttcttccaactcactccttacctccccctcttcccagcactcctgtctctccccagtgttagaaatgagttctgaatttctcttcaaagaatcagtatgtcgttttaaccttacaatatttcatattttaatcattcatcctttttacttgtttcgaggcctgtgacaaaaaattcagatggaattacataactgttctgtttagaaaatagaagtaaatgcaatgttccggagctgacatgtttcttgtttctttttttttttcttttcttatcttttttttttttttgagttggagtctcactctgttgcccaggctggaacgcagtggtgcgatcttggcttactgcaacctccgcctccgagttcaagtgattctcttgcctcagcctcccaagtagctgagattacattaattaaccagccaccatgcctggctaattttttgtatttttagtagagacagggatgtcggccaggctggtctcgaatcctgacctcaggtgatccgcctgcgtcagcctcccaaagtgctgggattacgtgtgtgagccaccacacccaaccccagatatttcttataatcccgctaatgacaagacaagcagagctgatgctttatgacagaccacactgagaaactctgatttctcttgacgaacttccctaaagacagctgttgacaaatagctcctcaccagcaggcgcatgtattccagccccatcagatctccatcttagctgttcctcagtcagctaccaagaagccagcacttgtaggttatggcttgtggatggataaactctgggctggaccacagagtcctcccattcatggtgcttcagcatctcacttagtcagttgacccagctgtgaaatggatctgccttttcttgattatcttcttctgggaatgcctctcatagctgaaatgtgtctgtagcttgggcctaagaaggtgggtgacactgaacacaaggcagagagttcattgtcacaggactgagcacagctgagcggctgtgaccagccttcacatggaaccagccgcgagtagacaggcagaggccgccctcggagcctgggatgcaagcgggtctctctctgaccttcaggaggtcactgagtccttgtgggccctgcattctttatgtgcccagtaaagctgtcgggatggctctgtttgattttgttgggatatggagtgaaaagcaccaagctgtctgtagccactttttctcccctctgtgttttggaagcagatcaacttactattgttcctggtggagggggtccaggtttttggccttttgagcaaagaattgaacaaaatgcacaaacaaagcaaggaaagaatgaagcaacaaaagcagagatttattgaaaacaaaagtacactccacagggtgggagcagccggagcataggggctcaagaacccagtaacagaattttctggggtttaaatatcctctagaggtttcccattggccatttggtgtacaccccatgcaaatgaagtcatggcccccagtcagtctgatttgttgcagaaagcaaccaatccaaggtggaagtgaggttacaaaggttacacttctatgcaaatgaagatttggcctacggtcagtctgattggttgtggaaagcaaccaatcaaaggctgaagcaaagttacaaagttacactcctatgcaaatgtctgattgattggttgcagaaagcaaccaggtggaggcactttcagttttccatctgccttgcagaaaaggcagggagggggttgcaaagggagcagcctcaggtccttttgttacttaggtgtggaaagttggggttttcgttcgatttagttctaggaagtcagcgtgaatcggccttaggttccctgcccccatactctgttctactacctcactatagattctgatccttttaaataatagcgccagttcattcattagaaacagtggttggacctgggaatggactggtgagtcatgtcctctcctatggaagtttcctgagatgggggctggttttcttcggagaatcacagtttatcttctaattagttgagtgccctttgttttcctttactgtccttgcaccaaaaaaagaaaaaaatctcgaaaatattgccaacatttattgaagagacttttttcttcttttcttgcttgagatattttacgtttgaagacaatcaactcttcatctcacctgctggtccattcagccaactttttttccccctctaagatttttaacaaaaataaaacaggaccaagagatagcaattactactactattatgactacgatgaacaaaagttaaatttcttaatctcagattgttttactgccttgcaattaaatatccagatctaggagaaaactatttgtagaagtcttgaaaattcaactcataaataaatgcccttattcttgatattatagacatttcttctgtaaagtatggcacatctataaactaaaaatgcacatctggaaaatccgtaaggcagaaattccagcctcccctatccacagccatcagaggagtccctcacacacctgtcgccagcccagggctgggaagatagaggtgctgctgcagagggagttccatgactcacccctgcttccagtttttaaaaagggctgagtctgtcgggttgagtacttcccttccatcacggcaggcagtcacttttcccaagtcagcgtggacttgggcaagaccagtaggctaatgggaaaataagattccaaacctttaagtgtagtagcctaaaaattgctgataggaaagcgatcaaggactgaaaactgtcgcatttaaaatggaaatgaagccagggctctgaagtagagctgggcctaaatgcagtgattaaaatagtcgttaggctgctcgcaattaccctagatgcagcaggctgcctgcatctttatggcggtactttgattccaatcagagatttcacatgaacttattttggtcttttcaatgacgtctcagagtagaaaacagatgcagtcctaaagtaattactaacctttttatcttgtgaaagagaattcagatgagcgagatctctgcggtgggttgatctgagtgattggcgcctgcattcactcgcccattcattcacctcctgtgcttgtcaccaggctacaaaaacgaagccaccacccctctctggtgccaaaatgtcagtttggggaaagctggagctcccttctgagagccaaatttatttttttttatggaagagattcccctgtaaattctgggaaagtttgagagaaagctccaggagtagtgacaaagcaaaaggactgggtgaacagaaggggcatcggagattgtcctgtctgcctgcagccagctggggaacagagaaggtgagtggggacagagcccacaggtcctgcaggtgtccaggaaccaaccagtgatgagcagtaaccaatttgggattcctgtcccagactgtagcacactctttggcacaggattttgtcatggggtgtgtcaccctcaacgaaaggaggtttgcatcggtatagcctgtgtttggtgccctgatgactgaaagaattcctgtgagatcattttgtgccagccaaaagtgagttgtattagcggaagcataaaaagctgtcctcttaaatcataggtgtaatgacgtcctttccaggacgagttaccatagaaagctttttaaacaacatttattttcctaccttctgaacctatttcttaaagacaaaaaagaaaaataaatgtactttgctctgttattgtcagcctagatttctctgtctgccaggagataaagccttaataattcacggccactgagaagtgtcatagtccttcctcccaccccgccccgagttaagtgttaaccccagtacatacctggtcacgctctaatttagtaatgatgatactttgctgttataaattttctctggggacttgcggggatggaagagcctttactttgtcttaaattctatgtacgtgtaattaatcaaaacattgattaatacccctggaagtatttcaaagatagaaaaacattggaaacacattttaggaatttctgatataagttttcaaggaggttgtgcagaattggtaaagagaattgagtatgaagatggcctgttgattccttttaagcgtttaagtttttccgtgcctgggattgccttatgtgcaaccgccagcttctgtcctttgaaggttttcctaagatattttcctagtttaataggaagtgtggacatgggacattgtacggcttaggagactgcgttgtgtttggttttgaatatatattagatgcgtgaccctccctcttaagaactgattttgctttgagaagatctacaagggccaaaagtggacctgtttcaaaattctggtcacagtgtctaggatgtggtgaattctccatcagtgtggcttaatgaatgagagtgacaagggaggagggtggggctccaaggcctcgcaggggtggtcaggactggtgttgcctcctccctcagcctctctccccctacctactgcccattcggaagtccaggcctcctcctcagtcactgagactgctttgtcagcctcctgcttctgtatccaggcagatgaccccacactgaatctttgctgtgctggcctctgctcttgcctgtgacagagctcagataggattctttcctgttcgaaagcctttgatgcctccctagcacctaccatagtggtttccaaacttgtttttggctgtgaacccctcttgtcgagggtctcctaagttgaaggccagtgtgtaaggcagtgggcagtgcagggcgccagtatttccgccctctgaatgtggcaccacctgtcccagtgggcgtcactcgctcatgagcagctattcccagagagcctcctgtgttgcaggtgctatgccctgcagggagcggagggccctcccccttccccttgcacaccttgtactccaggcactgcaagctcgcaccctttccttagcctcaaagccttgctctgagcgaaaacctgcccgtccctcaggcatcggcaccaactcggagccccttttccaaaatctcgaggctctcctagccctttcttggctgcaacctctctggcttttccgccaaactggaatcagcctcggagcaggaaaagctggggccgtgctcacctttgcttccctttgctgagtacatggtgagttcccagcacgttttatcatgtgagcgtctgctcttgagaggccaggctggatcctgcagagaaacgaggaagtattagacagaagtgatgctgggcgcggtggctcatgcctgtaattccagcactttgagaggccaaggcgggtggatcacgaggtcaggagatcgagaccatcctggctaacacagtgaaaccctgtctctactaaaaatacaaaaaattagccaggcgtgcgcctgtaatcccagctactcgggagtctgaggcaggagaatcacttgagcctgggaggcggaggttgcagtgagccgagattgcgccactgcacttcagcctgggtgacagagcgagactctgtctcaaaaaaaaagacaaaagtgatttcctgagctgctccgagctggagacagaaccagcagacatgggacagaagaagaattacaggtgtgaagcgcccgtgtggggctgattcccacctgcctcctcgttatcagcaggcagccttgcgtctgcctctgggagcagaaaccgttgtttcaccagcaaattacgctggctgtactcgccatgtcctgttgccatagaggacgagtcacagctgtctcacctgcacccctccaatcgccttctcagaatccgacgctggtcctaagtgccttcagctgtcacctgagcacgttcaagcctcctgcccagcaccttcctagagcaccgccattggcataaggactaggtaggcagatgtcctgataaaggtgcacgctcaagtgtttgagacgttaacgaatgatggctgtgatgtaattgactcagttgacacatacagagatagaacaaatatggcaaaggacttgtatttattggatattagtgggtttatggggtttatctgttgtatgttacattttctgtacctttgaaatgtttgtagtggttggaaggaggggacttccttggcccctcctggctctgccctgagcccgctgccctcaccctctgcctcagacctgggcgatctcatatctgtgtgtttcaccgaggcactcacatttctggccactgagaccctttctctgagcttgagacttaaatatcagctgtgtccttgacatcacacctgggccccagctgggtggcccctctgtccctggctcaggttagacccctgggccactctgactcccctcccttcctccctgtggctgcttgagcaccaggttgtattggttcatgtaccttgtacgacccttgccatcagagccctggccccagccaccatcgccccgcctgggtttccttctgcactttccactttgggtatccacccatttcccccagttctttgaccagtgcagccagcagggaattttatttcacgtctaatcagacagcatctctttagtgtctttctcagaccaccactgtgctgtgggtcctgagagccagaaggttcttcgaggttcttaagagtccctgtcctcatgcttcctgctccgtgctcttcctcctgccccaggcccctcactcactcgctccttatctgtgagcatagagctccagcttctggcttcccagggagtgtttcttccccctctcctccctagttcagttctgaggtcggaattcccggctaccatgtggctcccctgactggagacgcagtgccagggtcctcatctgggaaactggtgatgatagaggtcctgccagtgcttggagcagggccccacacaaggtaggactcagcatggcctggagatgacggtggcctctgatggctgtgttcttggtctagactgtaaaccccatgggatcaggaacaaccacatctagaccctcatattagggatgccagcccgggcaccacatctttgtcacctgcatctctgtggcctctccagccccgtggcagtcctcactgcaggaggctggcaccctctctgtgcctcacatggatcaactgacttccctcaccaaccccaagaagcatatcctgtgtgtatgttttacagataaggaaactgagccacaaaagggccaggtaacttggtaaagatcatgcaggtcataaattgcctcactgagctgggaacccaggcagtcagcttcggcgctccccacccctgttaggcaacctatgaacatttaccaagaacacagactcatctgcaaggaagcctcagtaacttgatgaggagcagctagaagactcgagggagaaaaatccttgtagacacatcagtggattcaggtgacttgtgttatttttaaaatacagcctcgccaagatacaattcacacagtctccaacctaacgatttagctctgcttttaagactgtgttgggtttgactttttttgaggggcctcggccactcttgggttgtttgtaatctaaaaataattggggatgaatattggttacatttcatcccgtaggaccttagtctgtctggtcaccacttacccctccaggctcttcgaatgccatatttggctatgtgagaatttgtcagagctcagctcagcactcagaacccgctggctctccgggttctgcccttcagctctgcgagtccagagcccaagctgctccttggaaaagcggaggccactagatggcagtaccgccctggctagaggtgcccttggggctgaggctcagacatccctgcccctggtttccttcaggtgagatcatcagtaacctacaggctttgcagactgaaggtgaaaaccagttaatgtgctacatccattttaatttgaaagatacaatgaattaaattaggcataaagtgaatgtgataggaaactggaagctcatggctgaagcctggaccgctgtcagaactgtgcagcctaaagccgggacccctggtagctgctttgtaaagggcagcagcagcaaaatcctcaccactcgtgcttggaatgtacgctgcaaagtttgtacttaacagcaaatggcataaatagcctctattccattaaagaattggactgcacaatctccttagagaaaatttgatgaagcggttcatgcaagacctggagtgatggtatcaccacgttagcctaaaagagtgtttgaaataggaggtgacattcctggggggggctgcccctcccacctccacccctacctcctgttttcaccatttcttgatacagtggtgcctaattttatttcaagaagaagatagtttgttgctttttttctttttttacagctttaaaaaataagttgaggaatttaggtttaagaaaattaatagctacaggtaactgcaaaagatatcattggcagatgcagcaaaatatatatatatgtatttccacagaaaattggattctgcccataaaacttagtaatactaataaagacaggtcattaccagttttaagccaagtaagcaaactcaaagagatcttctgtcagtgtgattcttggtggttttttatttttttggagaagtgtaaatcagctttagtgcagcaagcacaccacagatttgctgaaatcattcctgccccttctgacggtgggtagagttgctcggccaagtaatttacagtgctgtggcaaggtatgtttatatttaagctgtgcaacggtgtagctaatgagaaagataagaaatttatagtccttggtgattgataggattactgcctaggcattaattgaaatctgagggatcacagctgtgggtttaagttgggggaaaaattacttcaagtaaaggaaaacttttagatttgcttctgaacattttgaagatagttctcccgctgacagtctggttggtggtagaaacagttgatcctggccgaggctggggtaattatactgagataatgatggtatctgctgtgtagcctcttcaaggtaggtggtttataagtgtgggaaaaaaaattaaatactgtggggtttttaaatggctttaaaattttacatgtataagaataaaattctctgcagccactctttgctaaatattctctggacaattatttaagacattttaaaaaaagaaacccaaactaataatgacagaggcaaacctgtgatattagtcattgccttaaaatttccactgattatatttaatctgggtatgtctaaagtaatcttacagacctttccctacctgtcattttttaaatgtaccattcttgttgaagctcagtcttgtgaaaatgtctaaattttcccattaagtgcttaaaaagtaataaaactaaagtcattagacttcactcatcagagctatattgggagaaatattctttggtgcaataaatctgtccaggggttcgacattcatatcccttggattcattccctggaaatggacgtttgaaggtaaattgcttaagtagggcagtttaaatttttaatacaatcttattgtaactgttatcacatgattaaagtgcaaaggggccttagatgttttgtaagatttataataaatgctctatgatgccttttctgtgctgaattatggatgttatgacagttaaatgcttataaaggccagaaaggcacaaatgaagagttgggtctttattggagactaaatcacacttattgaatgcagacagtttttcactggacacgtgttcattcctagattcacagtctcggaggcacctagaagccttcgtaagccaaacagtatccagtgcctctcttttctaatgcagtgggctctggaagggtaaggcctgagccaatggaagctgttttgaaaaatacccaaatagcaaattattgttcccatcaccagttggcttttttggggggaggagggacttttttttttatgtaaataatctcatcagaggcctgattctctaatggatgccgctagtgtatacggagtttccgcattccttttgtagaatcaaggaagcttgaagctacgtcttcatgcatcatgggagctgtgatgccctttaactttctagacccagtgacacaatgtggttcctttcatgttcactgtttggccatagttgattggaattgttgttttaaggcctagtttaactggacagcaggactaactcttcatttcagaaggaaggcctgcagcccaggagatggagctgggcaggtgccctcctcacgagaggctacaggccagacgcagggcaccaagagcatggcatttgattcaaagccatggttgagtggattttcaatctatttgaaggataactttggctactatatagtatttacactcctgcccattttttttttttgtattttttccatcaaaagagaaatctgttttgaaaacagaggtaatgtctttaccatctttctcatgtatattattttttggaggaaggaaatagccagttttctatactttgacaatgtcaccatttgccatctaaaatttcacaagctgtaatttgccttttacttacatatctcatccacagatgtatttgagtgtccacagtgaaatggttgcattactttcagattacttcctttaattctttagatgggtgctaatggtttgggttattaactggcacagatctgagttctttttgtctatgcttgttgtttttttcccccttcaaaatgaatttgcaaaagcatcactagaaaagcttatgtgtaaacatttatgctagtaatagataaaaggtgctgtgtagcagtaccagtgggagaacgctgaagcccagaaggaaagtctaccttctttggaataactgaataggagtcccagtcacctattcccactttctctttaactatcacccttggatggtattgaggaaaccgtattgcatgcctaattttcacagcgttcagtattaaggtaaacctactgattgtgtttaagttgaagtataccttttccaagtagctgtgtaactggcagtgacagaataggtgttgtatgggaggcagcattttcagctgtaagtgcaataaattgtggtttgtttattttagtttttaaccttttagactactttgtgatcggcaggagattgtgtgtgtgtgtgtgtgtgtgtgtgtgtctaggttgcagagtgaggatctggtcagtgattgacacttgttttcaaagtgttcaccatgaattttttttcttaaataccatttttctcagtgagctttgaaccatgatgtcaccaaagacaaagtgtttctcaggcttttcttagtgaaagatactttcctaaggtagtttatagcaagatttggggattaaaaaaaagagttgaatttatggcctgaagagtcattataaccttttacctatagctaacatttacatacctcaggtcaaataaatttagatgtatgcttaatgttctaaaagctctttgttccttgctcatccttggccggaccagagaagttattgataatcaggtgttgctttctttgtggtaggacatcaccatgttctcatagagtcctgttaggaagcagaggacggactgctgtgtgtcactgtggagagaaaaagaccttgtgacgtccctgtcatcacaggattctagtatcttgttatgccagagatgtggtttgaaaacttgtttttatggacgtacccacaaaacattatgctctgtggaaagaggcacgcacagaaaagaatgattccatttatatgaagttctacaacgggcaaactgattggtgatgaaagaaatcggaagaatggttgccaggaagtgagaaggagggattggttggggttgggggtggcccagaggaactcctcagggggatattttcatcgtggcttgggttacacggcatctgtcaacattcatggaccggtacaactaagatgttttgcatttcacagtatgtacatttaatctcaaaaaaagaacctaatagttaatcacgtgcatgttgaaatgtgtgggagtgaactgatgcctgcaccgtagttgaattgcatcagaaaatgaaatggacggacggacggacggatggacggacggatggatgggtggatagatatataataaagcaagtatgtagcaacatgttacaattataaaatgtagccggagtggaaggaggtgttcgctttcaaattttttttgtatgcttaaaaaatgtgttaataaaatatagggggaaatcaaaaaaattgttactacattaaaaatgtcattgtaggtctcgtacattaagatgggtccagataaacctaatttaatgtgatgtgctttctcacaagtagaagtgtacagtataatgaggagccacaatttttacaaaaatgaatcctgccagaattaaaaggcatacatgattctttgaagaatttcactaatgcatagaaactgcggtaacagaaaagaatactttgacttcctcactattcctaaatcacagcagattacagattcaaaatcaatcagtattctctgctgaactctaattaacacttaacattattagtcacaaatgtgaaatcttgatcggagatggcctcaggtattctaaatgtaaataaaattaggtttagatcccttttaattacctgaggtgctgtgagcgattacaatggcaattgataaacttaatttcttattaaagcaaaaaaaaaaaaaaaaaaccatgaaaagtttctctctgctatatacttaactcttcagtagccatggcctatgcaaaaaaaatttacctggtttatatgttaatcatatagaatttagatcgttttaaaaatgtttatgtggaccctcaaattcatcatgcatctcctaagtttgtgggtaatgttactataacatcacaaagggcaaaacttccccagaggaacttcacgtatcagaaaaggtaggtttctgggaggtaatgctggttaagtaataataatggatgggtgctggggagagtattacaatgacttaatgcacaaagccctgttgaagaccaagtggaaatctgttttgtcatctcatccttcttcctaattgcatcacaatacattgtataattcaacctgtgtgtcactgtcacttcttcccgtgcacagggccaccgctgctggctcattattaacagagcagggaggagacgaataattctctcaggttccaaccaagacatcttctctcccccactttaagaagaaaatgtcttttttatgtagattgttgtaaggataattatttctggaaataggaaaacagcttcagttgtggtagatacatccatttttcttaaaagtgagaagctatccgaaggagagtgtgcctgtgagaaatggaaagattacagaagtttctaaactccttcttctgttggtgttcatatctaaaaataggaagcaaattagacctgataagttgttaagcctatattaatcaaactgtgttaattttttaaaaagaaaaccaattattgcacttaactggatctgtctcaaggttcctgatttcaaaatcgacttttggcctttacgtcttacattttcccttctttagaactcttgcgtctcctgttcctcatttatcttgatcttctcatctttttttctttataattttgtgtagtttcttacctggaataatttagcataatctatttttctttaaaattttgtatagtttctttagctggaataatttagcataatccatttttctttaaaattttgtgtagtttctttagctggaataatttggcataatcagtctggcacgctatcatgttgttggtggtacctttttctctttgtatgttttaaaatcctttgccagtcactttttctgtattctgtcttcatagtttatcgtattcctttgataccaccatgtttatctgcacttatcttaggtctttctttcattccactgacaaattgtgttagtttactttgtaaccccaaatttgggccttttaaaaaaaacgtggatggaagagggaagtcccgtagctttgcctggcgtggaagagtgttgaggagcctcacgtgcagattgaagaattgccgggtgagccttcaccttcaggggatggcagaaacatttctgctccaggatcatcaactttctctgcgagacagcttgatgagttgagaagaagtgacaggttcatctttcccttctttgtttaagtcatttatctttgagatccttgcctgccatctaaattgtattgccaatttactgggatattcacttgcctcgtcttggaagacgctgatttgcatccagcttgagaataagtgagagagaaagttaatcatctcctggccttttgaacagatttgtactgtgtttaattgtagcatttgaaatgttacatattttctaatgagagtctatattcaactcttgtgttaacctgtatcatgaggagaatagcacagtgacctagtctagaaagctctgctcttcggaagatctttaatttatgctttttgcatatctttctccatttcagattaatctaagctatgttagctgcttttaaattctgcctacttgtttttgatgatgatttattcaattaagtggaataattaataatgaattatagttgggcatggagggaaatggtacactcagctctctaagagattctgaaatttttatcgagattgttgtaggggtaattatttttggaaataggaaaacagcttcagttgtaataagtccatttttctggaaaatgaaaagctatctgaaggagaatgtgcctgtgacaagatctcgtctagtttcttgtgccctgtgacgagaagagcacagctctcttactctgagcaggtgaggtcttgaagaagcacctcattaataaggtcctgaagaataagttcatttgtttatagggttcaggagacccctagagttccagtgagaaagcgtgagctccgtccattggtcctcctggccctgccactctcttccccgcttgttctggctcccgtattcttgacaccttttcccagcatatgctagttttgtttccatcaggcttccttgagggagctgtcgccccccaaatcagggtcttgacaccagctcctgccactctgacacatacttaggcagtgctcagagtcgagctggcctggggccgtggccccacaggcttgtgatcagtgggctccggttctcacttcttgtctttgagttctcaggcttctcccctctcctgttgtaagagttgagctagcaggggccgcctctacccttggctgctgcttccaaaccatgtgggtttcctatgtcatgaaagcttttcttcatcacgtgctaatgacttcctgttccacaggcgtaacactttctaatgtttcattcatctatctgagtttttcctgctttaagtgcctcttctatgtctgtgcaacattcattaatttctcagtatttcccccttgcagattattccttctttgtctgcatcatagacacacgcctctctttatagcactttctatatcccacatgctgccacttatctaacacattgggagagaaaggtgcagacaaggtgtgcaggaggtggatgtgatgttgtggttggttggttgacattttctagatgatgcagctggcagatttgtctggatttcacaatctcccacatctagcaaattgcctggcatatactagttgctcaataaaaacagtcagtaaatgggatgagtgagggatgctataaagcatagtaaagaaaccttccttgacacattaaagggaaaagcagccaactccacatattaaagaatgggcagcaacttgcttggtttctgtgaggacttgcttaattctgcattgaccaagagcaagctgaagagcattctgggatcaagaagatgaccaagtacattgtgggaccaagagcaagatcaagagcgttctagaccatgagcattctgggaccaagagccatgaccatgagcattccgggaccaagagcaagcaaggccaagagcattgtaagaccaagagcatgaccatgaacattctgggaccaagagtttgaccaagtattatacattctgggaccttcctaggccattggcatcaacgctgcagcctctgagtcatgcatgcctcatggggtcatcctgacttaacctgatgggtaggacttacttgagtagggcaggaggttttgaaaggacatgatcatacacagtacttagctcaagtgcacagagaagcagagtgccatactgggaccctacggtacagccagccggagacacagggttccagacacagcttaattccttcacgctggagtatgacttggatgtacaaactcctaatccctaaggataggaaaagacctagaagatttgaggattttaattcaggaaagtccaccaaaaggataaacagctaggagcccactagtaagccaggatggtgtggtgcggatcttggatgaggttagctgagtttgaaaactggagaaggcatggatgagagcaatgctgagggaaggtgaggcagggtggggagaggagtgggagggtaggtgaggcggggtgaggagaggattgggaggcaaggtggggcgaggagaagagcgggagggtaggtgaggccgggcaaggagaggagtgggagggtccatcggtgtcgtcagtgcacatcccggtgcttggaactgactggtgggcgtcctgttggtgcatggggcagactgaagcctgagacatgacccccgagggttctccagacaggatcatttggagccccttctttcccaaatggtggggagaagtgctggcggaagcagaatggagccctcagaagcgcgcattcagaccggcagtagacaaaaccagctgcggggccacaccacgttagggtgcttttcggcatctctcagtggggtgaacgtttgcatgttggtgcttctgaacacaggatccctggtcctcctgaggcctggagcctggcagttggtcagctccctggcccctgctgccctctagcccagggtgactatgggaacagacattcctgatttttggcagctcgactttgggattaaatgttaaggaactattgtgctttgaaggagtgcatggaagaggaagggatgtgtgtttcctgcagcgtgatttgaagtcccctttaccacaaataactactttataccagaattggatacacatattaaaaatgtcaaatacaccatatttgtttcagcacagggtttttgtttttgtttttaattatgttctttccccttttctctgaaaggaaaagggaaatcccgctgccctagacatggtagaaatttcccctcattctaaaattctgaaattaacgtcagcagccttgactttgctctgtcctgaaggtaactgtttattacagtcggcatttaaatcccccgattaataggagcaattaaacaatagcttcatttccagcaaattaacaaccctaataggtaattgcgacataaatgaagataaatttgttttaatacaacgagataaaaagaatacagacaagaactgaatttcagattaagaattcagacttcagtacttcaggaaaaacttaaaagcttcactagaagaaatttaagcaagcttggctttttaaccacagcctattttagattagagggttgtttgctcaaaaaaaaaatacatatatatagtcatattttgtgcttcgatactcagaaggtaaggcatcaaaggattactttgatatacgcaaggtaagtcaacaaaggattaccacccaccgaaccctttctcctgctggcttgcttggggcatggcatgtcctaatgacttactcgagcagttgaatcttggccacagcttctcattaggctttcagtgacaaggaaccaaaaagcaaatgcatagaagagcatttcctatttacacacccctaagttaaatttatgacctgtttagttgcaggatgtcttaccttccttgttagtatttgttctgattggaaaattactctgatggtttagaatttgtcctgttgaaatgtggaagtagctggaccagacttgttcataaatgcagcatccatgtgaaggatgggtgggaatcggtagatttggggtgaatagctaagtgctgattttaaaggtagtggcaaaaaaaatgatgaaagcctcttctagaacaaggataatgaatttctccttgtggggtcgccgtgcttatgggaagatggaacgtacattaaagaaattttcggagtttagctaaaactgtatcactgagcttgtatcaccttatcagaactcattttggtagcttagaatcatcagatgacacataattagcctagaattctgtgtgctgccaaaatactaatccagtaaaagggtagagggacagttttagatatgggagtctcaaaacaaaatatatgtgtgcttctcgggaaaccgctggaaccaggctgctgagttcagcccctgaggctctttcccagcccctccgctccccacacccctgcacactccctttcttgagtgtccaggtagaaatgacctgtatcttctaaccaccccaggtatctttccaaagcatagatctcttcacttctctattcaatttgaataaccccccattgccttaaggacaacttcacacttgccactcttctctgcatatcaggtccttagaaatgcatttctagttgcctgtttcagcatcttctcccactaccttcttataaccttcccaccccagccccactgttgactcatccattcattcatccagttgttgtgtgcccactgagtgtcaggcaggccctggccccgggaagttaaatacagcatggcctcaagcatttccagaagaggtcccagctcggtggaattggcccattgtcttggaacatgggctgactgtactctttagtagacggcacagtttggcaggatctccgcaggtgtgtaagtgccaggctatgccatgggtcccatggttcactgattgtcattaaggaacatactgtagccagaaaacccaagagaccatcatggatgtgtgtgcttcctcacatggctatgatttgacttagcttttctttatcgctgaaaacacagatcatatgaaaacacatttaggagatgggcttgaattatcaacaatatagagtacaccttctttaacatttaactttgagattttcatggtgagaaaaattctacatatttcttttcactccgaagtcacacattctgaactatatagataatttggtaattaatttcttcttaataagatagtttaatgatcactttactgtgatttaaaatggagttgagacgttaggggatcttttatttgttactggaagattacagccggtagtggctttcattatttatgggagggtctccaggtaagccccctatggttcgaatggaagattctttctttttcttttcttttcttttttttgtaggggcgggggatggattagggacaaactgtccctgatatgctgatatgccctgtccaaactcctgacgcacagaatcgtgataaacaataagatggcacgttgatttgatttgattttttttttgagacggattcttgctctttggccagactggagtacagtggcatgatcttggctcacggctcactgcaacctctgcctcctgggttcaagcgattctcctgcctcagtctcccaagtagctgggattacaggcacacgccacaatgcctggctaatttttgtatttttagtagagacaaggtttcaccatgttgaccaggctggtccaaactcctgacctcaggtgatctgcccgcctcagcctcccaaagtgctgggattacaggtgtgagccagctcacccagccgggaagagcctttcaatgaaatgtgaagtaagtgtcacctttgggtggagacaccaaagacagagacaagacatgcagtgccctcagctgcataaattttgcttttaaaatattttcgtggagtaaaattagtgtttagtctcatgtgaatttcatcagtgtgtctatggtgagcatttaaaatacggttttattggaggtgtggttcgtactttataatccctacctaacagtgcttactcggaattgctcccccgcctcccaagttactggcctcactgtgctccagctttcccagtagcagaggaaccctcttcccaaacgtgggcttgatttacaccgagtcattagttgtcatctaatggtggctcttcagtgtcactgcaatctatacgctttctctgtgtcttccttagttctctgcccccacttttccccacccttcacgtgtcatctggtcccccacaaagcttttgcatggggttcatctgcctattccaggagagactatggtccttatccagtagtactaatgtgcggaaataccaggagtggacaagccaccttccccaaacatgaaagagcccagttttgctaaggagctgttgaaaaactggaaatagaacagcgctgtggtaagatttgcctttgaggtcgccctgtggtgtgttaggggcatttaggggacagtcagggagactcatttggaagttgctttggtcaccagctgtggaaggataagtcttagaccaaggcagtggcagtgaagacgaatttctgagaaactctggtggttgaaccaatcatctgttaggtctgttctgtccatggtgaagagcgggttgtgccatcgactgagctagaaaacagacgagaggcaggtctgagagaggctaggaggcccaggctgggcggcgcggacttgaaggcgcctctagcagatccaaggggagatgccgagttggtcattggctacacaactctagaaggcaggatgtgaggcagagctcttcgtggcagtggcgatcctgggagctcctggcactgaggtggtgaccgagacattcgcgaggaggttgcccaggcagagggcatgggaaaaaggacaccaggaggatgccagggaagcacccgcacttcaggagccagcaagggaggatgagaaagagaagttccagccggaggaggaaaaccagggacgtcagggttcatggaagcccgaggaggatgcagaagaggaaaggagggaatgacgaggaacgccacatgctgctcagaggtccaggaaggtgcgacctagcctctggaccactcccagtgaccatggcaatggcaggcccagcctagggattgcagagagcaggagaggcagagtcgagcagcatccccgggctttccagaaggcctggctgggaatggggcgtggcacacggtgtaatccgggcagccttggcgagcacctcctgtgtgccagtcaccacactcagtccttttcagcattttgtttagttacccaatccatttcatttagtcacccaagtagaagttagaaattgatgacaaactgagggtgcagggcaaaagaacacatgattcgtgctgtggaaccaggacagtctgttggggtgctggcagggtgttcgattgccacatggtggtgtcatgagcagtcccagagccgtcggattgctctggtgcacttgctgcctggtttttctcacctgcaaaatgaaagagctgacaggatgaaatgagttaatagatgggaagtgtgggccgcctagccctgctcagcctttgagcagcaaaaaggaggaagggggaggaggaggagctgtcctctggttatagagggcgtgaggttggcccggaggctcctagtgtgaccaagggctattccttgcctcattttgtgtgatttagaaacaagatggaagtagaaattgggcattatgtcaggatttaatgaagtcttgtttgggagctgttgtcttatttttaaccactaattaaagggtgctatttccctctatagaatagaacatttacagtttgtggataaagtaaatgtatacctcactttttttgttaagttcttaaactttttttttattattgaagaatggaaacatacatgaaagtgtatttgggcttaaaaagttgtcacaaaattatcctcaggtcaaggagggcctatttctagaccccagaaacccctgtgtcctgtcccaggcacctgcctgctctgctccctgaagatgggcacaattctcccttctgaccccatggtgaggccagcttggttttcacctttatacaatgtacacacacacacgcacacttgcacagttgaaggggctagttagaggtatcttttatctgttaacccaaataaaattttaaaattatagaggaagtgacttttaaaagaacactgagcattactcttgggagtctcaggagggtaattaaattggtagtgtcagtagtaagcgcaaatgttttcagtacccgttgacaccgttttagatttgggagtagctcatgtgacagagtcatagggaagtgtgctgcccaatttgagaaaagatcaaatctcagtgacaaagcttccagattttttttaaattaaatttaatttttttgcgatagtctgactctgttacccaggctggagtgcagtggcatgatcttggctcactgcgacctctgcctccccggttcaagtgattctcgtgcctcagcctcccaagtagttgggattacaggcatgcgccaccacatccggctaatttttgtatttttagtagagacgggatttcaccatgttggccaggctggactcgaactcctgacctcaggtgatctgcccgcctcggcctcccagagtgctgggattacaggtatgagccaccgcgcccagccgcttccagattttttttaagtaaatccacgtgattgtgtttctgatctatgcaccaacacacatttacattgaacatatttatgtctatgcacccacacacatttacattgaacatacgtatttatatgaaacaacacatttatttcttggataatcaaatatagacaaaaactcaatggttataaaaagcttcccagacagcacagtctggggtaatattcacatgttaaacctattaacatttaaatgttctaaatagtatgagtaattaacgattacagccacagaagagcagctccctcccgtgacattccatccattttctttgagttgtttttttggggtgggaatggaggggggttcctccactcacatagacacaccaagcttttccctctaggagattacccagcctgctgctgggttgtgtggggaaggactgcggatgtcttggatggcagttgtcatactagttttttgcttccccaaacaattcatttagggatgtctttaagtgaggcgcccagagattccaccccgtccctgggacatcaagcaaatagcagcaacagccgttggcaaatttgtggctatttgcagcattgactctgtagtcagtttgcattttcaagatgggggagacatgggcagacattacaaaggagtcctttccccttcctattcctcatgctcccgctcctcctcctgaagtcagatactttttgttcttcattaaagttttcccttattcgtatgggttaccctgtagttttaaagcattcaagcagtccgtatattttagaacaatatatttataaatcattttctttccttgatttgtgtatggaagcaggaaggacataacaggtagaggggaaataggacaaatatgaaaaaaaaatagtagagtttaaaaactactaccagttaccggatgttgtgacttcattttattttttaattaatgtggtagaatagtaattaaatggacagaagaattttagcagttaacaatgctaaatactcatactttgtacatcctgtctgtagtttgatgagaggctttgttgtagaaatattctctttactcatgaactgactcttcctagactccatagaaaggatagaacattcatttgcatttgaagtttcatacaacagtcgtttccataacatatttgacttatcttaggaagtttctcgcatcttcccttagtttctacaaatgaaaatgtctgcaaagctctcaaagcatgcatcctagtcctatttaattctgacatctgcacatttcttacgaatgtaaagtcagtgtggccatccagctgaatagtaactctgaagctgggagtaaaatcagatttcagtgtaattgataatcaaagccccttattgctatttttcaaaaacaaagtagcaatactttagcactcacccaggcaattatgatttttggctaatttacttttggtttttgcaatttcaagatacctagacaacacattttgcatctgttgaaatcttagattttatttttgagttcacataatgactttaaaatattctaataaatgtcttcaaagaccccagatcaatatgccaatggttctgagatgacagagtgctgcgatattcctctgtaatttaaacatgattagctgatgaaggttatgtgatatcaatacactaccggaagataaattaattgatatcatcctttcaggatgataagaggcctattggaggtgggatgtaactaatgaagctgcttcttcctctctgtgagccattttttatatattgcattttcacttaatcatatttatactatcattcatttacatgaaacccataggctgtggacaaaccagtttcttattaaaattgtattcatttggaaaagaaattatctgcaaacactatatgggccccgtctacgttataacctattgctggggagagatgacaagttcctttccgtggacatcttcgaaaatagcaactatctaggcaaagtcaaggattgaatatcattgaacttaattactgctagtccccaaagacacacatctattcaaatcaaaagtgtagttattctgcggcagtgacaccattggtgtaggaagagttttctaatcgttgacttcctttccaattacattcagtatgctttatcagcgagcctatttgccaagagaagttatggctggttgaatttagatttgtattgattaagataaacttacaatgtgtgcagtcatatatttaaataaaaaaggtctttgatataattacatctccttgaatataattctctatgatagcttgtagagtgaagaggatttctttaggctttgggggaaaaaaaaagatttttgtctttccaaggggtttggttaaattgccctgccttatttaggattatttttgttccaagtaactggaaaaaaagatgattttatgagaataacttaaatgagataggtgtgtatttttttgctttacattcctctgaggtggtctgtgcagggctgctgaggccttctgtggagttgggggaccggctctatctgtctcccatgtggctcctgttcccagtgtcgcctcgtgttccacagtgctgctgaggccatgtaacgtttgtgcatttcaggcaacaagtaggaaaaacatacgagaatttaggcaaagggaggctctccaggaagatccttaaaagctgccctgtgatccttctgctctcatcctgctggccagagcttgtgtacctggccatgttcagctgatgcgggggtggggggacgggaggaggctctggcaaatgtcatgtttattctggttgtcatttgcccacctaagaaccaggaatgctattactgcgaaagaaggaaataacagatttcgacaacagactgatgatctctgctctgttcctgaatttggaaattgattgacatggatttctttttgtctgtgtgtccaccagttgcccagaagattgttgccacaaggaagaagcagcagctgtccataggaccctgcaagtcgctacctaattctcccagccattcctccgtctgttccgcgcaggtgtctgccgtgcacatcagccaggtacgttaggtgacatgagaagtcagactcttagaaccaaagacaatatgcaaatagtgttcccagccaatgctaaggttgattttttttttcttttcaactttataagtaacagcatgttgtaattgacttcacattttcttcagaaactgctgtggccaagtgatttttatgggaatcattcttttatgttttctgtcttcatgctgcctgtgttatgaggcatgctggcccgggtggtgatgggaggtgtgtgctgcagtcctcgctggtgatttaaaccacccttctctggtcttggtcctagtctgcttataggttgaacagttgtgagtaaatcttaatggccaatctcgctttatacttaaatttggtagtggcattcaattataattaccatctcccttaggtcccatagaaactgctatctttccataacaacattttgcaaaagtatttacttggaagcaaatgaaataatggtcactttgaagaactcaaccaacaacctcctaaggaaacagttgactttgtttttgtctgtgcttgttttttgattacgtttcttgggcaggtattctattggcactgtttttttaaggacatggtggaagggttcggtgtcgtactttcagtttgcttgggaagccagtaagttatggcatgtattgtcagagcctgtcaaggtacagtcatgaatgttcatgctggctgggctgagtggcagttgcctgtaatcccagcactttgggagctcaaggcaggtggatcgcttgagctcagtagttcaagaccagcctgggcaacgtggcagaaccacacctctgtatctacaaaaaagagaaaaattagctgggcgtggtggcttgtgccttgggaggctgaggtggggggatcacctctgcccagcagaagagctaggctgcagtgagtgtgattgtgccactgcattccagcctgggtgacagagtgagaccctgtctcaaaaaaaaaaaaaaaaaaaaaaaagaatgtcttcacttgctgtgtttaattttctgtgaatcttgaaatacttttcaaaaacacttagattttccaggtgtcattttcataatgttggctgtggttctgctgatctagagcagtggagggaccatagaatccctttagtttaaccaacccctttcattttcagaggaaagagaaaataatcaaatttgaactctcagaaatcttttaagttaaatgaaagagacttctttgtcttcagtcacttttctcaggggatgccactgagtgagatgattggcatgttccaggatgagactctgtagacatgacactaatacacctggcaaagccatagacgcaagtcagccattcccatgcatcccttccatggggctcatgctcacttgttggttatgaccttgcctaagtggaggtcttgggttcctgagtatgtcgttaatgaaaccttggattttaatcatttcagacaagtaatggaggtgggagtttaagcgactattcctcctccgttccatcgactcccagcaccagccagaaggaacttcggatcgatgttcctcccactgccaacacgcccacgcccgttcgcaagcagtctaagcgccggtccaacctgttcaccgtgagtgtcaaccctgggtggagatttgaatgcgattccgaagcgttcccattaacgtaaacctggttgccacatggttcagtggtatttgtagaatctcaactatattaaagtgaataacattgatttctgtggaggactaagaaaattaagagaagcaaagatttggatgttgagtagaatgggaatttcttcatgtagacattcctgacttcgtgtgtctgaaatgaagagctgggggtgtgtataaaggcacttgttatcctgtggctccagctaaagatgtgtcacagtggatacaaggagatgacaaaactctaagattcccagatgtgtgtctctaaccgttcagatgatatataagctattactgtccacaggccctcttcttcttctgctggggtgcctggcgctgccctcggggtggaggtgggggactgggaggtgcttcctggaggctcattgccatgaggctctccacttgggttttttgctgtagagcatgttgaaagcagagatgagctatctgggttcaggtttataaattcacaatctgggtgcactcgggcatgcattgttccttttttttttttttttcttttgagacagggtctcactctgttgcccaggctggagtgcagtggctcagtcatggctcactgcagcctcaacctcctgaaatcctcccacttcagccttctaagtagctgggaccataggcactcaccactacgtgtggctaattttttttttttttttaaagaaatggggtcttactgtgttgcctagggtggtcttgaactcctgggctcaagccaccctcccaccttgtcctcctgaagtgctgggattacaggcatgagccatagtgcacagccagcatgtgaagtgcttgaaaactccctgggtgattgagatgcagagaatctctgagctacagaggtggcaaaaatgctgccagcctgtcccttccctgtgcatagcagacattaccaatcaatctggattctacacagttgagccgcaaactccaggcacagctgctgtcaggtgactgaagcatttggacttgagaagaacgcttttcctccctggatcacgcattacaagtacatgcttttgaaacagtgcttctgaaccagggtggttttgctctccaaggacatttggcaacttctggagaaactttgggctctcacaacaggagtatgggagtgggaaggtaaaggttctgcagacgtctagtcgtgggtagcaaccaggggtgctgcaaagcatcccacagtgcataggtcagcccctcacagcagggaattatccagccccacatgttagtggtgccctgttttaaaccatctgacttccattttggttgattactgctgacccagatgcaaagctctagaggggtggctgggagtcagatttgctgcccctttgtgaatctgatcttgatgttacattgcgattcctgccaagtctgggagatcccccgcccctctgccacatgtctggggcagtctctcattggatgctcatgactgcggaggcggttgccagctgcacacaccccctcgtccccagcctccccttgcttttgctagttgccttgcgccacatcagctcccacagaggccactgctgggcagcagggtgaggactgatcagacagaccaagctcccatcccggcctccgctgctgacggatgtttgaccttaggcaaattacttgacctctctgggctggaaaccatagtacttctgcagtggggcttccgggaagacttcctggaggaggcagaagagatctggtggcattgcttccatggttttctcactccattgatgctataaaatgatttctgatcgtgttaagcatatgtgatagattaggaggtgggtatttaggtttctgtaaaatacaggtgagtatctcacatgcttaaattagtgcatggataacatgttttattgggcagtttcttcacacacaccgagaacagcagcagtcacctaaatagctgcttcccagctccgtctaacacctggagcagcccctgtctacccccaggctggggggctttgggttgaagtgtttcctgctagaacaggctgcacagtgactcggtggcttgagaaaccaatagccaaagatgcagctggattgagagaaggtgggctgtgggcaggcggcctgtgccccgggaggaggggcgggcttgtcatcgtggtggtcgagaacaccttctgtgtctttgttaagggagtggaagggggagagcactcattctcagacgccttctgagggccacattttctgcttgttgactttgctttctcttttaaggagagaaattttaaaaccacaaagtatctttaaaaatgagactatttataaggagaataccagcaccttcccatcccctccctttataagctctggaactgcagtgtgccagaaagtagtatcccactgggtacctgacaacccaggtgacttagggaggagaacacttgaaggcagagagaatcaaaataacagcccatttaataaatattgacttaacatctgctctgtgcacagccctggttttgctcagtgtctaggaggaagactcactgccagagtcaacccatgttcaagggaaagcgatttagggtgaaggagaaggggctctgcacactaggaggagagaccctgttgctgcggattcaccctgcagacacacaggtgcacttacaggcatccatgaagaggccgggcagggcaggtgcagaagccagtaaaaactcattgttacagtgaccaaaaatcaccattaattatttcaccattaatgtgtcacataatataatggtctgcctatggatctaagggtgaccagtgtttgttatctttctccttaatcttggaaaataaatttgagatcagatcagaaattgaatccagctgtcccatggcattagtgggaatagaaatttggagtcataaaagaagctaccactgcaataggtttgcattgtggcatttaaggaaaagacagtgaaagttctgggcagggatccatatgttggtcctcagtgggtttgacactgaacaaaatgatggtggtgatgatggttgtggtgatgatgatggttgtggttgtggtgatgatggttgtggtggtgatgatggttgtgataatgatggttgtggttgtgatggtgatggttgtgatggtggtggtgatggttgtggttgtgatgatggttgtggttgtgatggtgatgatggttgtggtggtggtggtgatgttgtggttgtgatgatggttatggttgtgatgatggttgtgatggtgatgatgctgcttgtggttgtgatggtgatgatggttgtgatggtgtgatggttgtggttgtggttatgatggttgtaatggtggtgatgatggttgtgatgatggttgtggttgtgatggttgtgatggtggtgatggttgtggttgtgatggtggtgatggttgtgatggtgatgatggttgtggtgatggtggtgatagttgtgatggtgatgatggttgtggtgatggtgatgatggttgtgatggtgatgatgatggttgtggtgatggtgatggtcatgatggtgatgatggttgtggttgtggtgatggtgatgatggttgtggtggtagtggtggtggtggtgatgatgcatgcggtgtagtcttaagttgaagttcctggaaatagtaactccactagatgtcagtgtcatccaaggaacaaaaagaaggcaaattaattgtgaaatcatagcaattaagatattaaatttttatcatgaccagttttcttctatttttaaatatgtaaaattgaatagactcttcatccctggcagttgttggtgattataggcataaactgtcaaaatgtgtatttatttggaagtgtctagtcagaggacagatgcatgatatgcagacaatcttagtgaataaaaattcgtgcagactgggattgtaacacccagctggaggggcactatccaccttatttattagaacatcataaagaggccatagttaattaagtaatgcatgtatcattttttccaataccattttacacattttataaagtacactgtaatgcactgctctgggctaacattttgtgctcccagatgtttgtttgcatatattcatatacaatttttaaacaaaaataaatgacttttttataaaatagtacaaataaaatctctgtattagtccaaattatatgttacatttgcagtaggaattctactttactaatcaaacactgagttatattttatttcacttatttctttggaaaaaaaacaaacattaaaagactgtatccatttaatccctagtttggtaatatgggttcttagagcaattaatttagtttagcggccctagtttacacgtggttaaagtgttttattagaaaaatttttcaaacatacagaaataaacacgtgtgtactcaccacacgcttcatcaaatacaagcccttttctgctacgctgctactgcaagaaataagcaaatcctaagtaaaagttgcagctccttccatgtgcctccagaacacgtttctcctgcctgtctgcctagggatcagcattaacctgaatttggtctatattatctgtgtccatgctgtaaacttgttctagtgtgagtcttgaaattatacattacatggccttgtccattttcaagctttataataacgatgttatttatgtgatatttttaaaaagcttaccatataatgttgataccattaaacagagccaagtgcacccaggaaccaaagattgtgaatatacattgcccagctcagaaacttgccataaaaaaataaggcagcaaaattcatagtgcgaagagaactgtttcaatggcatttatttgtttttgcagaggagctcctgggtacctcccctagtgtgttccagcagccgttgacttagccactggttgaaagggggtaaacgggcttctctttgatacagagggctcttggcaatgatgcgcttgttcctgtaggcaggtagttagttgatgggagtgtcctccatggcttctctcaccacggcaggggaagttaaacatttttgtaaagaagcaggtgataattggattaccttaacctttctttcctctgcatcgagtgtttgttggaggctaagcagttactatggtggcttgctgtgcgttgacttaaaatctgcagcccttctgggtgtgatctgctgctgttccatttctggcagtgtgcagcaggctgtatgcagggcagggtcactcctggcagacgccgtgggtgctgagggctgccttgtgtctgatgattcctcggatccattccagcatcacggaaggatgtgccattagtgatgaggtctcccaagttagcagagaaaggaaaccttactgggaatttgtatatgctggggtgtctatgtccattggatttgatttagtctggttgttggatttaaattttatggatacagcctgatgtagacaaactaattgtggggctgaggtacagcaaactcttttgcctaacatcttgccactgttctttcccgaaattttagttttttgactgtctccggcaaattgttaaagttgtcaggaaatttttgttttatttttgcaatgaagtcttaccgaagtttcagtctcttttatctcagagtgtgtgatcagatattgagtttggtggttcacagttcatgttctaaggtgtttacagcagggcaatgagctatttcttcccatttcaagtggaatctgaaattctgctctgagaatggattggctggggggacagatgagctgccttgttacaggaagatgttaatttttttaaagtttgttttgttaattattctggtttaattaaccagaataatgaagatggatttccaaatttagaaatttagaatttgtaaaattcccaaagtactcttaaatattttttgttaattaaaaaaaaatttttttaatgttatcactgtgtgctttgaaattcattttaaaactaggaacctcaggagccagcttttctcatcaactgtgatgtggagaaaagaatttaaggctattgtgtagctcttactatacagtattaagaattaattaaaaagaaaaatgagcccttgacaaagaattgataaatatctctattttccttctagcccaaagggttaaccttacgttttatattcttctgcaacttcatatttgttgcttgatttattccctgtcatctcattctaggcatccaccaacctaagggggaaacaagtgcacagtgcttggcacgtagtaggtgttcaataagcatcagctcttatcaccatctgagaagcatgtttcctaatgagcacagctgcccaggagagtagcaccctttgaagtgctagatctgagtttccatcatgggaactgttctccttgtcctcctccttaatttggtagcagcctcttctggaatcctaaatgcgtcccatcagcccttgtttgtattatgacccatgacattgcccctttaatatgtatgttttttaaatcagctgttccagctcacatccctttgaacctggattccattagcttttcattgtagcagtggacaccacaaagtctgttcatttcatatatcatctcagatttgaaaagcacgtgaaaatgtttctccattttcaatattgtgtgagtaatgttcccattgaaaagtaatggagtgaagttgtcacttgtcagcacagttattaaggaggacgagtctccaatctttctctcataataaaataaatctgtcagaaaatcattgtgctcacactttctcatgccatcgagagaggagactgagacgatggagctccttcagttttacccaagtcaaggtgcgcttttggttggggcttccctgggttaaaggtcaccacccttcctgcccggtggcagccactcgtcgtccgcagcacgtcagcagtgcatcggagataattgactcaggaccttgtcaaataaagctgttcattatttcccaaatactgacctttcgtccaaaggcgattatcaggggttttttttccccttcattattttttgtggtattgtccactagcttaacttcgaatttgccattttccaaccatccagaagcaaaaacggaaaatgttaacagcaccttgatactaatcaagagtgtgccgttaaatcgcacagctgactagtcaacagaattttaaaatcattcaaacattaattaaatacatatgttgatgtagtagattttccaaataaacattgagcagccccttttttcctcggctgtgtgaactgcagctttcaagtgtttttctgttgggcgttactttcccatatggcccattggtttctagtagttgaattttgaactttttaaaaaagaattaaaagataattctgtggtggaaaagtcagggggaaagtttagatgattctctttaaaaatgatgagtcagtggagatgaactactgagctgtctgctcgtcggacgtgtctgtgcgcacacatagatcgcgcatgttttctaaatgtgtattggcaggaattctgcaaacaggggcagagccccgtctgtgaaccacagcccttacccagatgccaactttccttttgctttgcagtctcggaaagggagcgacccagacaaagagaagaaaggcctggagagtcgtgcggacagcattgggagcggccgagccatcccaattaaacaggtgagcagcctccccatccttccctccctgtcgccggagatacacctcaggtcttcctggagatgatgctggctctcgcaccaaggtctgtctgatgtgctctgttgatgaatgtagaagtctctcacttgacatcaattagcagagttcctgtgtgtattcaaatgggatcattagaatgagaagagggaacggagacaacagacctaatgaagtgcgggctgcccgcctgcatatggagtgcgtttccaggctgagagctttcaaaggctgcctttgtagcacggctttgattgggccgcgggccgccgggcaacaggggtaactcagatcgcctacaagagccccttgtgatcacaggaacagcccgacgtggccctaatttgctctcacagacggacatctgaacactgtttcaggctggtttgtaacaacgaggcaattagttgtgataatcatagccggtgtgtcagctgtgcgctcttgtttgtaatttgctaatgaaggaattgtaactttgattaggttcggtttcatttagaccttattatataaaggaacatttacagctgtaatgtggggccttaattaaactttctcattacacaacaggacttgaattcaaccatttgttttggcctatgttgctagcctggaacagggtttcattagcccagaaaccagattctaaatcactttatatctccaataagaaaaaaaaaaaaccctggagtccacgtgtgacgtagattgtggtttgatttccaaggagaataaaaatagagttcaaccccacacagtggcttctgaaatgtcatcttttggtttgttaaagaaagccaattgatttagagtgcatccttcttgagcagaagcctctgtgggcaggagaatggctccgcctctcaggcacagggcttgtgaccggtgtgcacctccggtccagctcactgctttgctctcctctctcctgcgggcacctacacagcatcggtaatcccttaggaactgtgtaggcactggctgcccttaaaaaggggagagtctttccacacatggagttggattattctggtggtgcaggtttcgtccatttgaagcaaataggaacgcagccttagagaggggccagccagtgtcagcgtgaagatgtgggagaggaaggggttaaatagggccacagcatcttgggtgagaccagaggagggagtccacagagtttcccaaggagcccaggaactactgcaaaaaccacacctctgcccacagcgtaaccgaccctgcccgggagcaagctttctccttccgtgctcacagggcacgcctttgccaggcagagaagaaggaggcctgcaggtcatcaccaaggccctcaggcatctatgtaagatacatgatcatctactgggccgcaaatatatggattggcccggggcacctttaggagaaattctcttccctccatatattcaaagacaacaacaacagaactttccactttgatgatgggtggtgttttcactataaaacacttcagaggtccgtgcacatagttgcttattctttcttggtgcctttatttataacctaactctgcataagctaatgttactgtgtaatttttatgccactgatacctttttcaactggaattataaaaatcagttataaaaataattctttttcataaactggtaccaggacatttcctttggggaatattaaaacttaataatagactgttttcttaatgcctgtctgtggttgatttgggtgatttgggtgggagcgctcaccagcctggcgggagtccctctgtgcgagccaggtgggcccccggtataattggaaccttcattcaatttgtacctgctcatctgtggagggggctagctttgcaggctagcttttcaatatgtgtgcagattggaactgaccatcaagcgtaaaatgagtattatccagtccttggatgcctttcgattgtgaatgttcaaaggaatctcgttgaaatctaaatcatggtctgatttcccggtgactcctgggcacagggagctccttgtccctcctaattgtccccctcttgcagccacagacagctccctcctcacatccacacctgtcccagcaaagtgcccccgtggccagctctccaggcctcgggtgcctcgtctgtaaaatggggaactggatgatgtctgaagcccttgaagcagttagatgtggaggttccacagagaatttttaaatgttagcaaaactggatttttaaatcggggcacccttgtcaaagcctctctgtgcatcggacggattgatgtgggtttgcagacggttgtatcgatctatctcacatccctgtgtgtacccttgtttctaaaggaacatagatcacttcaggtagcctgaattcctgaccttcctggtgtgatgacttcagtgtggaaatgaaatgagaggattgcaggggatggagcctgatggccatattctagaaactcaaccaaattatttgttgaataaatgaacaattaaatgagtgcttattatgtaagtgctgttcatacaagatcccacttaatcctcgacattgccacagttatggtagctgtgttctccttattttaaacacagagatagggagggccctataccaggcagctaggaagtaggtccaaggattcggaccaggcctctctgcccctatgtctgcgctctctccactgcccattgatgaaaagccttcagaaagcttaggaagcaaagttacatgttttaaattaagtaagtgaaccacgacctgagacaaaaatatcttacgactgtataaagaaacttctgagactgcctgcagcaacatatttctccagggataacacagccctgctcagccattctccgggtgggaggcgtcattccattcccatccttaccgtgtttgccgcaaacatgttctctgctcttgtcacttgctgcagagaactgtgtcttaatgctcagcccatgtgaaagactcgggtctgcatgatcgaagcctcacacaccagctaatggacctttgcctaatggcagaggagtcgttttagaaccccagcaacctgcgtggagttgctaatgcagactcttctttcccccagcaggagtcttgtaatggatggtttaggatccaggcaaggcagccttcaacactctctgcaatctaaccccagagtttacagatagtacgtgtcgcagtggcttatgttaaccccctttcacttccatctgatacctcgttcgctgtaagcatccaggctccccccacctcagtgtgggagcttgccaaatcatgatggtcaatgacgttgtctctttcttctttctcccgattaaagattccccatcaagaatatgacttattttctggactataacttcatttcttgtggacctgggtctacttctcctttggtgtcctttctggggtcttggaggaggttggttcagagaattcggtttctttttttttttttttttttttactaataaggtctattcgagtaaaaattaagaagcaaagcaagaaaaagccagaggcccggctcagcggcaagtgggtttgtcacgtattaatttttcattgctgtggagagttgtacatacataatcacttgattgcagtgggagttagggagctcctatggtgccatttgcataaatcttgttaagtcaatggcagttaatgaagtacaaatgagcccggagaaggtgacatgcaaatcgtgggtggcagatgggaggtctgtttgggggacagcagctgtgtgctctcctttctttctttctctttagcattttttaatctctatatttgagtacagatacacagtcatacgccttggcctcctccgtgcccttcgcagagccccggccagagaacctgtccatcccctcctgcctctgatgtccaggctgcataaaccgttcaagacttgccttgtacttggtagcgtacgctagaaggatttgaattttttgaaaatcatgctcagtttatctcatcgtgcttacgcaattgaaagcgtatcatttttacttggtggggacacacagaacctcctcactacatcttttgagacgttgtgttgtctcctgaggtttcagagaataaaaaagaatagaagataccatctttgccttatcatgcttccatttgggagtcttttcttcctttttcagacaggccaactgtatttactgattattccccgtccctggttcgtggttggaccatcaggggattggcattcctagggttagtcaggaatgagaaatacagaaagtgtgcggggcatgctctgtacctcaggccatggggacgaccgctccctgtcatgcagacccctcagaggggccgcccccggcccggcccagctctggccagggtgtctcacgctcttggttttgtgtttaaggatttaagtgctagcaggactcacagagagctcttagagattcatgggaaaaacattgcctacgactttcagaagttttgtgtttatttgatcacctggctgatgttttgagagaaccaggtctctgcttgccttgaagaaaggtaggcaaagacgtgtgcatcaggaggcaacagccctgttgacagctgcggtggtcacatgctggggatccttttcttgcaggccacccactctggtccgtcctctgcgatgcccgccaaggtgctgtttctcagttctttgggctgcagggcgctgcgggggaccctccatcaggcacgctcccttttgtgatgctcggtggatgcaccaaaggagcaacatccctcaaaaaaactttttttttttaagtcttcattttgaccttgaaccctgatgtcatggccacctccagggagtcagctgtgagagcagtcatttcccagcagccatctgaagccgtgggaaaagccttcccaagctgtcagaggaagagccggcctgcccggggcaagcccgccgcacccgccatcgggcctgtgaactgttttgaagctgtgcgtgttttgattctcagttgagtagaaagaggcaattgtcaattaagtgaaaggaacctctggagttaatcccctcgtccagcctgccgcaggccaccgacctgtgttgtctggtacctgggatcaacacgaggggtgtattgtgtggcatgggcagaatgaaagcagcctaatgacgccagcgttaacagctcctgaaactttgacactgctcacagcgagttggttgactgcttcaccggcgtgtgctgctttcatggaggaaacaaatgtgaagaccacgctgaaacttgatagagatcggaggagatggagaggaatggcagtgcccttccttcaggggcatggagagaggagctccacaggcctgcggcctctctgcgtaggcagaggtttacaggaggacggctcacgtttattaagccccaccattgaggaaccaaggtgagcgagaggcccgccgagcgtacgatgtccacccacgtggcaaatcagctctgcctgggcgtaggggcccgttttgctccccagaagcagataatttacagagtgaactgccgtgccctgcaagctaattgacctcacttgggtgaacaactccctgagagtcttatattcagcccggttcacaacagacccagcccagttacgatgattaatgtaatagccaggcaggtgtatcagtgcttttactttgactcctcaaatctcatactgtcattgccagaacagtccagaatatctggaggcctacacgtgaaatgacagtcatccgtctttgagtatatcgggcacaccctcccctacatccccgcccttttggcaatgttggtgggtgacaatatgttcctcacaagatgtgcagaatgtttatttggaattactttacccaaagcacaaaatccatcatttatatgcaaatctgcaaagcaatcgaaaagaatacttcccttggccgtgagggttgcatgagggtgacaggaagtagtgtagccctaggtgcatcatacacgaccaactgccatgctaacagaatggcgtttccaagaacggaagttcgttttaagactcagtgtgtcctctgtgtatccattgtccagagctggtgaaacaggaaaagttcctttatctccctcgcagggcatgtgatgggctgtggctcacttcttcggtgtcccgcagctcagacccctaggggggcgggcaggcagtcaggcgggttgtggggagcatgggctccgatcccacagcatggtctagggctgggcgttgacagctcctgaagccccagtgggcgtgtgttacagtgtgcttttcggtttggctgtccacaggcagcctgtgaccatcagctcagttagtccctctgccttattgcaaggacagagggtttctgtatcccagggttcttgccttagtgtactggaagaattggatcacacgtcagcttggagaatgagtgcaacgtttaatgagtggtgccagtagttctcagcagatggatggtagccagaagggcgatggagtgggaaggtggtcttaccctggagtcgggccactcagtggccggactctcctcctaccgcccccgggtgaattccacgtcacccacatcgttctgccattggtggcctgccagagtctgttggtgtgttcttctgccggtgtgcttctctcgacgcccagccgcctgtgtgtgtgcccactagggtctcggggtttttataggcacaggatggggggagtggcaggccagggtggtcttggaaaatgcagtgtttgggcgcaagaactggaatgcctgtcctcgcctatgtctgtgggcacaggcccaagggcggagctcttgccagggagcctgcccttctctacccagcacttccctgcctgcctcccatttcaccgggataatatctaagtgatttgtttcagcaaaatagtgcttattttctttaaaagttgaacagtggtggtgaaatccaattccccttgagctcagaaatacaagctctcctacaagtagaggaaagattctcaaagttaatgttgccagaacttgtttttgtcttgatgaatcaaaaagatacttatttctggaattatttcttatcagatttgatcaactagtaacaattgttcactggtccttgtgtgacatgccctgggtcctctgctacggctggaggaggcagaaagtgtctgcagcccccaggctcagctcaggtgtgtactgacgatcccatcccatgacccccaatgcaagtggacgggtgtcacgccaaggagtggtgaattctactgagttagacaggagagggtgagggaaggacagggaaatggaggtggggacaatcccactggactgggacatacaagtaggtggtggcagaacaggagggaggcagacagcagagctgcggatggaggggttcaggaggaagtggggaggagggtcctaaaggcccagggtatctgcttgccaaggactctggctgctctgcagagaagggttgatttccccatattatttgtaggagcagtggtgttgggggtttagagactcatggccgcacggagtggatctccctccccttcttactctgtccccatagggtttgagatgatgggggttctgatgtaccagagtcttggcggtaaccagcgtttattgaccacttttccgagtgccctgtcctagagctttccactgctgtcccccttacctaggaagtgccacgctcccctttcccatatgagaacattaaggcttggggagacagtggggcgtgcccagcagccccacacagcgcatgagtccccagggctgccctaatgaaatcctgcagcctgggcggcttaaacagcacaagttgatctctcggttctagaggctggaggtccaagacaaggcccagcagagcctgtttctggagagccctctccttggcttgagcctgttgccttcttgctgtgtcctcccgtggcctggactccatgtgcacacgcctggtgtctctttttcttataatgatgccagtcccattgaatcagggtcccatctgtacgtcatttaaccttgtctccaaatacagtcccactgcgggtgagggcttcaacatgcaaattttggggggacgtatttcatcctgtaacacacagctgggtagtagcagagctgggacgggagctgagctctgtgtgaccgagagccatctgccatgttctttccatctggaatgtcctagcttaggccttcctggtcatataaggtaaggccacttgatttctaaccaacatatttgagaataaaaaagaaaaacttacttgaagaggccgcatgcgttagataggaagcatacgagactcaaagtactccgacttgggggtttccattgaaactttcctaagttgtggtaaactgttgtcatttgaaataagactgttgctggaacgaatccttataccaggtgcgtagctctcactctgtgcagtgcgttttacagctgttgaggcctttcagtcccgtccatgggagacctccttcaggctggttttgaaaaccaaagctcccttcccttgcggaggcagctcctcagggccgcgggtaaatgttgggcctgtagctggggatgttcaggaagagcctgtggattgggcaggtgctcactgtccgtcagttgtgtcactggttgctttgacagtggctgtggtgttttgtgttttggttaatttctcccaggtataaaagatagctatatactcacttcattactgaaagaaagatacagctgggcatagtggctcacgccggtaatcccagcactttgggaggccgaggtgggtggatcgcgaggtcaggagatcgagaccatcctgactaacatggtaaaacccccgtctctactaaaaatacaaaaaattagccaggcgtggtggcgggtgcctgtagtcccagctacttgggagcctgaggcaggagaatcgcatgaacccgggaggcggaggttgcagcgagccaagatcgcaccactgcactccagcctgggtggcagagcgagactccgtctcaaaaaaaaaaaaaaaaaaaaggaaagaaagagcaggagtgcagagactccaggtcagacttaggaggcctttcaccttaaaggttaaaatccccacacgtgacaagtagctctgactacttcccacagtctttggccatttgcaaacactacatagaaacagatgtctaccagctgggtgtggtggctcacgcctgtcatgtcagcactttgggagaccgaggtgagtggatcacctgaggccaggagttcaagaccagcctggccaacatagcaaaaacccatctctactaaaaatacaaaaattagctacacatggtggtgtgcacctgtaatcccacctacctgggaagccgaggcatgagaatcgcttgaacccaggagacggaggttgcagtgagccgagatcatgctactggactccttttttgatctctgtctcaaaaagaagaaaaaaaaaaagatatctaccaagaccaagactcctaaggaaattgtatcattaaagtcttatttcagttctgcagtatttatttaacagttcctgacagcagactcagtttctcctcgtgtaggaacttggactgtggaataggacttctcccaagctgagttttgtcctttgtgaatagaggctttgacaaccaaacaagcacctctcctggcagagagaaatcactggctgccagaatttcatgttttgtttagaaacagcaaccgtggaacttatggcacttggcatggctcttagaccagacacattttcccagaaatggtcaggaaggcccagactgtgcactctgtcccaagactgtcgctgtggttctccctcacacacccctatgacatggttctgcttgttgcctactccagagcctttggctccacaagttctaaagaaggtggcggcttaataagtcttcacagtccccttttgaggcttttcaggaaagtcatcagacaatgacatttttatcagatagttttgagtagcaaaaacactttttcctctcctacatctaaaagtaaaagaatttacttttaactgactcactgaaggccatgttttgaaaccaaaacactctttccttggtaccaaagctgacagctataagtaaatatataggaatgtaaatattataaagtaggcatagaagagtttgttagttttaggttgggtgcggtgcgtcatgcctgtaatcccagcactttgggaggccgaggcaggcagatcagttgtggccaggagttcaaaaccagcctggccaacatggcgaaaccccatctctaccaaaaagacaaaaagtagccgggcacggtggcgcatgcctgtaattccaactactcgggagcctgaggcaggagaatcgcttgaacccgggacggggaggttgcagtgggctgcgatcgcaccactgcactccagcctgggcaacagagtgagactctgtctcaaaaaaaagaagagtttgttagtttgggaaatatgttcctagttagacattgtccataaattacctaatactatagttaatgtttgcagactggtgaaaacagaaacatttcaaaatactattaacatcttagggccgtcccaagtctagtcctcctggttcaatccgatctgctccctgcaatatttactccctaacctttccttctgcttaaaaactcatcagaatcaaccacattattatcgtgtgagacttgtaataagaatgctggcagttacatgccgagtacatattgtacattacgttggttgcttcatcacaggacctcatttaattctccaccaacctaagatacaacttgctactctgttctagacgaagagtttgaggttcagggatgttaaggtatgagaccgatgttatatagctccacgtgagtggaagagctgggattcaaatccaggagtcctctctgaaacattctagaaaagcctatgctgttgcatccccttcccgccccatgccatctgtgctcaccatgaccgtcttttttttgtttgtttgtttgttttgagacagtcttgctctgtcacccaggctagagtgcaatggcatgatctcagctcactgcaacctctgtcacccagattcaagctattcttctgcctcagcctcccgagtagctgggattacaggcatgggccaccatgcccagctacgttttgtatttttagtagtggcagggtttcaccatgttagtcaggctggtctcgaactcctgacctcaagcaattctcctgcctcatcctcctaagtagctgggattacaggcacatgccaccatgcccgactaaggtttgtatttttagtagagatggggtttcaccatgttaggctgttctcgaactcctgaccttaggtgatccacctgcctcggcctcccaaagtgctgggattacaggcgtgagccaccatgcccggcccatggccatcttttctgtgcaagatcaagcatcaagtacacagtgtactttcctggtggggcaccagcaaggcaggctgttttacgcagggctgtcctggaaagtctgtgctgtctggcacctggatcaagatcagatgaggtccttgagctccagtgttcatcggagtccctgtgggcccagaggttgcctgagtaggtcagaatcgagtatcgggaaattgtatttcttttcttttcttttcttttttttttttttggagacagagtctactctgacacccaggctgaaataaaatggtgcaatatcttggctcactgtaacctctgcctcccgtgttgaattgatcctcataacagcctcccaagtagttgggactacaagcacacaccacgatacctggctaattttttgtatttttaatagagatagggttttgccatgttgcccaggctggtctcaaactcctgagctcaggcaatccacccacctccacctcccagagtgctgggattacaggcgtgagccactgcgcctggcaggagattgtatttctgtgttctcaagtgatgctgatgctgctaatccaggagccacactttgagatcccctttctaggcacatggagtcacttagggcttctttcctttcccgcctcacaaatagatgactctttgattcgtaccagcccctttaatctgtgctcgtgaaaattttcctagccgtgaggcccgtgtcagatgccttctgttccaggtaaaccaatgagatgtgtgctctttccttttctttcctccgatgcccgtccgatcttgggatcttgctctctatcttccctgtttatagctatgtgcatcattcacgcctcctttcccacgtgtttccggatggtgcacactccgagacatgttctttctcctgcgttgtgtacacagcagggagggtatttggtaggcaggttgctggtggtagtagcactaggtagcataggttaattgtgtaaaatggcttttttttttcttctttctttcttttttttttttttttgagacggagttttgctcttgttgcccaggctggagtgcaatggtgcgatctcagctcaccgcaacctccgcctcccaggttcaagtgattcttttgcctcagcctcccggctagctgagattacaggcattcaccaccatgcccagctaattttctatttttcatagagatggggtttctccatgttcaggccggtcttcaagtcccaacctcaggtgatctgcctgcctcggcctcccaaagtactgggagtacagccaccatgcgtggctaaaatgtcttttcttcaccaaaacagattttgtttgtttaaaagaatatgttatattggagaagttacagtattcattaaattgtattttcaggaacattataatttttaagtcaacattctttaacttttatgtatctaagatagtatgtttaggttacacagaagtggtcacatttttttaatctgcaaagaagaaagcttttgccagtgacccaaaataatttcagaaaactggtttcttgtacaacttttctacttttgagtatttatccagaagaagatttgtttaaataaatgtcttcacatacaaaattttgtttataaggaattcttcaagattaaacccacaaattttagtaacaccggactgtttttgtaattgccaagtttttaccatattgttcagtctctatcagccacagcctctgtgatttcattcatgctaaaaacaagaatgtttatatttttagtgtacataaaaattaattttatacaaatatataaaacagctacacagaaatactagtggagagacgagtaatgtgccaagtaatgattaggcaatgaggaaccacgagaagcagatagctctggttgggtgtgttggccttcctttgctcatatctaaagtattggagatttaagacaatatgaaatcattgtatactaaaatgtatcattaacaaagaatgataaaatcctactctaagaaaaataaggaagagcagagttgtggaaatgcactgctatagtcctgaaacttgacccagtcttcttgaagggcaatctaacagtcatacatgatggacataagaaatttgattcactttgtcccagtgatctgtcttctagaagtttatcctcaagggaataattcactaggagaaagggaaaaagacctttagtgtaaaacagtgtgtatagcagttatttataatattaaaattctgggagctacaaattttcaacaagcaagaagttaaattagtaattgctaactgaatagtaccaggatgtacagccattaaaatggccaatttgaataccctttagagataagtgaaagcataaaacataaaactgtgtataataattggagcatgaaaatatgtatacatgtggctttaaattggatgaataggaacgcagtaacaagtgaactggggtaggtttaaagcagaacttcaatttttttttttttttttttgagacggggtctcgctctgtcacccaggctggagtgcagtggtgcgatcttggctcactgcaagctctgcctcccgggttcacaccattctcctgcctcagcctcccgagtagccgggactacagggaactttaaaaattttaacttcatgttttgaaataattttagatttgaaagaaatttgcaaaaaataatacaaagactccatatacccttcacccagcttccttcactgtggacatttttatataactagtacagctataaaaaccaggaaattagtattggtaaggtactagtaacttatctataggccttcttcacattttaccagtttttcctgaaatgttctttttaatctcaggatccaatccaggatccctcctttcacttaattgctttatttattttgccacttccaccctgagaaaattcctcaagtcttatgtccatgaccttgacactattttaggaatattgatcagttactttgtagaaagctctttaatttggattgcctgatgtcatctcctgaatagatagaagatctacatttctggcaggaaaaccacagaagccttgcacccttcctggtgctctgtaccagaggcacctgacagccacctgtcttattcctgggaacactgaccttggtcacttggacaaggcgagacctattggatttctcccttgagttcttatttttccatttgataaagttagggatgaatgtcttcggggagatactttgaggctgtgctgatcatttttagtgatagacgttgtactcaataataagtaggttttataaaatgaaaactattttcttctgataaatgtgtacagtcttaaataaaatttaaagtgcttttttaactcttcctgtattggagggaaggagtaaatgaggatgattttgaaacttgttggttacttaaagaagacctggggaaacctagaggtgaggaggaactggagaagcccaggagcgaggaggagctggagaagcccaggggtgagggggagatggagaaactcaagggtgaggaagagctggagaagctcaagggtgaggaagagctggagaagctcaagaatgaagagaagctggagcagctcaagaatgaagagaagctgaagaagctcaagggtgaggaggagctggagaagcccaagggtgaagagaagctggagaagcttgggaatggggagaagctgaagaagctcagtggtgaagaggagctggagaagcccaagggtgaggaggagctggagaagcttgggaatgggaagaagctgaagaagctcagtggtgaagaggagctggagaagccctgagtgagcccgagctgggagtggtgagtgtgagtggaccttcccagatagatctggtgagaatggggtggcagttctagaactgaacaagaggggcttcctggtcgtggaccccgacgggtgggcatgcggtagatacccagcacatccgagggaaggatggatggctattgatttcccttcaggccatgccaatatgtttgtcaagcaacagatgcaattcaagtgctactgtgatccaggtgtggctcgctgtttaggtaaagaagcttcacaaaggcgctgccacaaaccaacatgtgttctttgggtttcatctcgtaatttcattcatgaaggttgggaattctgttactcagaatcttacctattttttccaagtagtttctctcagagaacaaaaactatgtatagtatgtgtgtacatatgtaaatttatgtaacatattaacatgttattatgatatgtaacatatcattatgtattatgttaacaattataatctataattctatagattaaccctaagatttatttttccctaccatcttcccattgttgcccaaataactgagtgctgtctttccccacctccccgtatcacccaggctggtctcgagctcctggcctcaagcaaacctcctgccttatcctctccgagtagctgggactatgggtgcgagccaccacgcccagctctagagtgcttttccctgtgctcgcaccagaattacagtgaactgcccaacaaacatgctgtttttaaagctagaagggaccctcatcttatacctagggaaactgagtcccaggaagggtaaagagcttgctcaaggtccttccagatgctcttccagtaccatttccaccactgacaccagcattttcttattccttgtgcacttctcaaaaaaatagaaataacaagtagtggttgtttactgttttgacccagatatttttattgtattgcgactggtcagctttttctaagttgaatctttaagcttcatgctgttttatctgtttttttaaatatgcaagggaatagataaaaagcattacctttgaaagcatgtggttactaagagacaacatgaccatcctttgtgtgtttatgtatctagcaggctcattgattcccagcagtcctgtgaggctaggtggcattcattcctctgcacattttatagatgagaaagctgaggctcgccttgcatgatttcctagagcctggaagaggcaaagataagattcaaacccaggtctgcctatcctaaaaccagtggtcttcacattgaagggccttatgtagcaccgagctcccagtatgtaacttaacttatatataacttaacattctgtttatgttaaaaattcaggcacaggactacacccagggactactgcagaaacgttttctaaatagcgccaacgctgaggggtcttcgattggtggcacccgtgttccacggtacagctaggccttctgtgagatccctttccccttaatacagaaatcctctaagtgtattcgaaagcagttgtttgtaattggagtatctgggattgacagtggctttaattagttgattactagttctttaaaatgtactgtactcactgtgggtcttgcaaattggtaactggtagctaccagtgtaattaaatatttcagagcacttggctacagtagcattgaactgtgaagaaataatgttgtacagccaatcaaaaagagatacttgtaaactcatttacagcgtcagtgtgtgttaggaccatcattgagatgcttattgcaggagaaattaaagatacaattttgtgctaagaggcaatgtagaaattagttcccgaattacttgttaattgatttggtgattccctcgggtctgcatgctccttttccccctttttgttgttgcattcagttaacagtgactattcccagagcaataaaaatatattccacatgtagatgagatgtgcccttatatgagacggcctgcattctttcgcggtaccaagaaatgctcaacctaaaacacaactgtgtttttctcaggcatattgttgttttatgtatacccatcaaggtaaccggtgcattcacgggtttggataatttcaggaaaaggaaagcatgtttttatgtctcacgtttacaggcgcttttctgatttttctttccccctaatggaaaccttcctttttttatcaacagtggaggagattcaggagacttgatttatggaagctttttcttatttgcaattcagcaagaataaccatatgaaagaccatttgtagaaaagtgcaaattgctactgaaaatgatattgaaagaaaatgagacctgtttctccttgttgaaattgagtgtggatagaaggagagacagccatcgtgggtcagagggagcctcccaggcttcctggatgcaggctcccgtctccagaccccttccttcttgaccgaggggagaggacactgaaatgatgcacatattggtgctgctaatgtgaaagatgcagaaaccgttatccttttgaatttccagtggaagatccaacgaccctttgaacagctgccaccatggtggctgtggcttcattttgaggaaaacatttttaatatcttgttggccgtgcttatggcctgaaaagcagcattaacgagtttttgaaaactattattattcattttaggccagtccgttatttttttctattgcccttcccgtgatcacttatgcatataaatatcattatgcttttgcttaactggggcaaaaatcatgtgcattatttcagtgtctgcttttaaaagtagatggtagtattttattttcagttaggtgaagcagaaaaatgtatccagcaaagtcttcattaaaaagcttaagatggctagaactaaatatacattgaacacaattactaatttatcaaatatgtttgcatgttggtcagtatatacaataaaaaatagtgtttaatttgaaatgttaaaaccctctctaggtccaaaaaatagaatggatgagacctactatttgatagcacagcagggtgactttagtcagtaataactatacatttaaaaataacttaaaagagtgtcattggattgtttgtaacccaatggataaatgagaggatggagaccttattctccacagtgtgctgctttcacattgcatgcctgtatcaaaacatctcatgtgcctcataaatatatacacctactatgtactcaaaaaattaaaaacagaaaaaaaaaaatagaaaccctctcaattgttgctgcacccagcgtggaagaggaggtgtgcgaaaccatgctaacgtggcgccatgccctgtgatgaaagagccacctgcttagttgttggctccagtagaaggagaaggaacacaccgtttgcttactggatggcagagcgttggcatgctctttatccctcatagattcctttcaggttacccccaaatagggtgacctagttttcctcatgagcatggcttattaagggccccaaaagtctaacctctgccaactcagagatgctgcttgggcagatacagggcctgagcagggataaggaaaggtaaccatcagctgcataaccatgcatttgcaggttcattctttctactttcgtctccgttgctccgtttcacatatctttttttttcttcccccacccccactcctttttttgagacaagagtcttgctgctctgtcacccaggctggagtgcagtggcacgatctcggctcactgcaacctccacctcccaggttcaagtgattctcctgcctcagcctcccaagtagctgggattacaggcgcccgccaccacacccagctaatttttgtatttttagtagagacggggttttaccatgttggccagggtgggctcgaactcctaccacccgcctcagcctcccaaagtgctggaattacaggtgtgagccactgcacacggcttgcttccccatatctttttaaaaatgtttttttgcaacattagccaccctgagagtttcttcacgaagttcctgtggaggtggctggctgtcttcgtcacttttctccacagaatgtttctaaaacacacaaatttggccaaacagcctccaaagcaatgatttcatatctccttcctcctattgttcactaactttgattaagttagagaaaagtacctgcacttttcagatacggtggctccgcgtgttggagaattcagtaccagatccatggctcatcctaagcagggcaaggaggaggggagctcttcacccctgggcgggtttgtagtgcggcttgtgcgtctccccagattgcagaggagaggaaatacatccccttcaagatgagaggacacagctgcaacgtcttattttaaaaatatgtgtgacttttactttctgcttcatacatgcatcacgtgtttgaatatactttctattatttgtgagttaacattgctgtttttctccaagtgtttgagtgaaattgattctccacgcagactctccttgctcaccctgaggtttcagggctttgacctgagggctgagaccacagggcacagctcctgacccacgtggctgaagggcttggagcaggaggtaagggggctgccggcgtagctccaaggtgatgaatatttctacttgatatttctcctggtatttctgcactttaatgactatttctactaatacttgtactaataatttttaatggttcacattgagtaggtgacattttgatacattaatgagccttatcaatgacttttaaaagttccttagtgtgccaggatactttgctgcagcccttggaaggaaggggagagggtgtggctgtggcccccattctaccctctgagcatgagtcacaggtggcacgcctaagagtaacatccacggctgaatcgtcaccggcattgaactacacttccaaggttagtcagggaggctttcctttaacatagcttgcccgtactaaaagctgtcagaatactggagaaatgtaggccttgaagatagaggggtgttttcaggggtggctgccttcactctggaatgctttgcgcctgctgggatgttgctagcatgcctgtggggagaggcccggagggctgggctgcgagggaggctgcactggcttctgggaagcgctggtttctggagcaggccagcctgcgggactccaggactgaggcttgcccagccactgtgggtcctgacggtgcagtaggggctgcattttgacagacttacaacaagtatcccagagaaagatgagagcagatggggatcctgaattttggtttcctggggacaaatgttttctggcttgttctcatgtttctgggaaataatgggattaaattcgagtatctttcttggctacaggaattgatggaagaggaagtattttgaactcagtgaaatgagcattcctctgcactaggccgacccctttctgtggcagcccactggaacataagcaccccatgttgggaatttctttttttggtcaccagtgtatcccagacccctagagtagctctcagtaaatatttatgtaatgaaaaatctcaattctcacaaccaccttaggagggataatagcataatccccatttcacagacagaatgaatgctcagagaagttgagccacttactcaatgtcactcagcctgggagtggtaaactaacacttatgcattgtatggaactgcccacgagtcacgtttgttctatgagaaggcagaaaatacctggggaggtcttgcccaggggtgtgtatgtcttaattgataaacctctggaattggaaacgtagagggtagtccagggtagaatttaggctcaagcttactttgagagcatgttgccctaagagtggaatgtcatggagcaaattccagaagctttcgctcacccagccttttcaaagtccatcccaagactgttgggtccacatgttgctcggatgtcatgagatgtccctggttgacacgttgaggacacgctaaaccacacgaagataatgggtgtcattttgcatgactcacagcccttaccatttgaacgtgcaatggatgctccgagaaagaacagaccttgagtcctcgtttgtaagacacagctctcagacgcagcctgtccagagttctgagcctcagttttgggggtcaggtgtcattgtcttaagatgcagttttgtggactggtacagagttcagtctaaggcagatgtctctcttttattcctgttgtctttcaacatttgggctactgggtagatgggcaccagtgactgggcagattggcaccaggactttgtctacaacctgcgtttccctgtttgttctgccatggggcatgaggcagcgcctggctgaccttggacttgcaggcagcctctgtgcatcccctggcccctggccttgttgttagatggtgcatttcgttttctggagagagagagagagctggaccactgtggccgttgtcagaattccactttcgtcatcaaggattcattttctttatgtccgtaatgtgatggggcagcattagcagtcggtcacctgtgtttccaaagggagaagtattttcaggatgtagagactgtggccatgttaataaccaggttctaactttcctaagaaccctgagaccttgtgagcaagaaagggcacagcatttgacatctgagtcaatcctggccaaatgtatactgaattgccactagagaattcaccaccactcctgatgaagccagttgggtagttttccttcacttgtgaaaaattaatcatgatgttagcttgttatatattgcgaagagattttttataagttggtgatagatgatttttaattttttggactctctgtatttctacatcttctttgtgggaaattcttcaaactccatgggggcttggtgacccagcctgatggtatcgtccatccttgcagcagtgggtggcccctctgtgctgggctctgtggaaggcgcagatagacaggaggctgcttggccctggggagtttgccgtgcagggggtggtcaaggaccagagaaggtggtgtgaagaactggcaatagagagtgggtgtcagtgggccgggacaggcagagcttcaggaagtgacaagtagtctctggggaccggcacatctggacatggacagtcaaaggaagactgggggcacatggggaccaggacacctggacatacacagtcagaaggaagactgggggtcggggtgggacagcatgatgcagagctttggcggctggctgatggagtcgttctcatttgtgaagacactgtccagggctaaggcagtacttgccaaggcaaggccaccgtgatccgagactgggaggcccagaaaagatgcagacaaggtaggagtcggctctgtgtgacttccccatgacaccagtgggccaggctacagtcaccgtttgagtgcccgtggaggattggtttacttagtaaattcgttgtattttaaaagtcagatggaatttgtcttcatattttgctcatgtcagtgaggagatagatgtgtgctgtcacttagcagtgtccactgtctttcttcaaatcaaggccagtgaattttctgattgcaggcacttcaaagccgtcagttccattcattgtttttcaaagtattcatttcattaaacatcccatcagaaagcctctgatagagggtgccctctcatcaggtccgtgtgcaccaggaagtttacagttcagaagtgttgcatgctgagcactctttgtgagatactttgggggctcagggggcttggagtttatttgttgggggaagcaatgttggtagggggtgggggttgcaccttgaggtttctaggccagcccaggacggtgtgcggccccaagccactaacacagcactcctagtgttcctcacagcaggtggaaaatgcatttataagatatttcttcctcggaatttttaagtgattttacttctattggatgctgttgatagcctcattcttctcaggtccacctgtcggtaggcccagtagtcaactcctaactaatagagtagttattagctggttagttgtctgcagctaagcaggaatgggactggatggtggggactcctgtgagaatgctgatgggtgccgcctcctcacctgtgtgtcgcaggtgtaggcgatacctgggaagccgttgtacggggctggcatttgctacttttataagatgtcacaagcatgacccaggagcacaccccatgagagtcacagtggtaccagcacctgctggctgctctctgcactgatgacagctgttagggaatcacattcgagactttaactagattggtccagagtgcttcactcttcttctttaaaaaaaaaaaaaaaaaacagtaaacgttcttttttagagcagttttaggtcacggcaaagttgagcagaaggacacccacagcctccgccattgtcccccacagtctgttgcagccgatgagcctgcactgacagcactgtcaccctcagtccatctgtactttagggttcactgttggagtgtgttctgtgaatctggacaaatgtataatgagctgtatccaccactgcggtgtataggatcataagaaacagtttcactgccctaaaaatcctgtggtccacctcttcatttcccccaccgcctgaaatcacagatctttttactgcctctatagtttttcctttgccaggatgccatagagttggaatgatagaggtgtaaccttttcagattggcttatatcactaatatgcatttaagctttctccatgtctttccatggctcagtagctcatttctttccagtgctgagtaatattccattgcctggatgtaccatggtgtgtttatccattcacctattgaaagacatcttgggtgcttccaactttttgcaattatgattaatgctgctaatacacatttgggtgcaggtttttgtgtggacctaagttttcagctcatttgtgtaaataccaaagaacatgattgctagattgtatggtaagaatgttttcagttttgcaggaaactgccaaacagtcttccagagtagctgtaccactttttatttccaccagcaatggatgagagtttctgtttctccacatcctgtcagcacttggtgttgtcagtgttagactttggccattctaatgtgtgtatagtggtatcccctggtcattttcatttgcagttacctaatgacatataatgtggagcatcttttcatgtgtttatttgccatctgtaggtcgtctttggtgaggtttctgttcagatcttctgctcattttttaattgagttgttcactttcttattgttgattttaagggttctttgtatgttttggataatattccttttcagatgtgttttttatagatattttctcccagtctgtagcttgtcttctcgttttcttgatctttcttcttttccctcctaataattgttctccttcaaggttctccagcttattgatatgttgtttaggtaggtcttgggcttcattttgcctgtaacatatcattagcattttccttacagtttgataaaattaatttcaacaatttctacactgtgaaaccttctgagtgagcacatcctcaaaatcatcaactcttccgatgagataattgcttaggagcatatacagttcttaaaagcacttttatacattgtatgaaatgtagaatgggtgacattttataagttatatattgtagacattctagacttcattgcagctaataagcatccaggaatctgtgaagttcttatgaatgataattctccccatcctgtgtcagtgctaataacatctgtaattaacagctagggaagtcgttgcctgttggcagctgtgcttattggctgaagtgaccacgtgcaaaccaagcctggctgagccttgggagtgaagggatgttcaaacccacagactagaaggcaggtgggcagctggcacccagatcccatggatcaataccatgtgtgtgagagagagggtgggagagcctagctgccagaaggaggctggtctctcccctgcttcatgagtgtacaacaggagactggcagccccaaagcagctagtatcctctgccactgccctgaccgaggaccagggcctttggctctgagactgtgtgacatctgatggccagggcatgtacatcatcacaaggaaacaagacctggagggggccggtgagccagggagcatggtagaagagacaagccggagagcagctggctctggaggggcactggcaggacccgagggtgcaggcagcaagcaggctgttgggtgctgcaggcgctctccattggagcagtgctgtggaagcaccgtcggcctgccgccgtgctgagtgatgccagggccacgacagaggctggcgtaggcacgggagcgggaccacacgtggccaaatgagcaggaaggaagggacagggcaggattattttagaaacttagaaaaatcatacctgcttgctgtagcaaaattagaagatgtacatggacaaaaacgtagaagtcaccccttaatgccagtactccaggatgaaagtggttatccccatagtttgcacccctgttcaagttcactctctctgaaacacctaaaccacccacccccactctccaaggccctcatgctcaccttgactctcctcatcaccccgccccctcctcagagtgcttgctaatgtcactctggatcccacctatcctggcttccatgtgggtagaaatcttgacttttcgttacagtgaatgtcataaaaggtgctcaagaaatatatcccgaatgaatgaatggaacaataactggtaaacctttaaagatatttatcaaatgggatcccactacaaatatggttataaaatgggatcacacacttacatgtgtgcatgtttatgaatacatgtgtataactgaaacaaatgttctatgaaatgatcctaagtgcatctcactccaatcctccaatctggtttttttttttttttttttaaagctctggttgcagctcactaaagtaatttcatgacccactaattatctcacatattttgtaaaactcacattttttttgtaaaaaaaaaaaaagccagtagcagcactggctctttgtccagtattgacatgttaactgtcatcctagttgagccagccccctccatgtaggccagtctggcgaaatccagtgctgtgtctctatgcagtccacgggcacactgagttctcatttgcccggttggaacagctgatggttagttctcagcgtgatcaccgtggtcagatgggcgccccatgtggtgccttgtgggagaaaagttccaggttttctttagctacttccacaggtacacagaggtgtgctggccatggggtttgtgtctctgcatgttcttccgcatagtatgaggtgcaggcttttatttcatagggacacaccagtgtcagacagaacatggggacaagatcacactgcagattcagatatgccttctgtcctttcaaagggtgtatcctggttcatcctctgtccctgcctgctggaataactgcttcccccgctgcgtcctgtcctcgtgcacccacccaggccacagagcccggtctgtgagcagcaggagggcagagccctgtcctcctctgcagcataacccataattatggctcttaatttacatattccatgcctgccttgagaaaatattttacctggaatgtcagttttttgggtaccatccactggagttcacattcattttcaccagttgttcacttagcagaccattagaaaggaggtccctgcgaggtccccgtgagaggataggaaaatgccatttaaataaaaggtcagcaagagcgagagtctccgaagttagacaggcatccggagaaaggtggatgtggaaagtgaggttgacttctgggcgcatgtgtggaatatccaggcccttagaggctcgggtctagtggtggaggatgaggcccctctgccatagggagagcctgtcttaatcacgccacgcaggtggaacagactctatgcagaaaacttgcggaagcattttgctaacatcacgagaacatgtgattcgttagttggagtggacaggaatgacttcagaaaccagagcagggagtctcgcttaaagtcttggcatcctcgcccctcggcctcacacctcccccgttcccgattctctacttttgctctccccgattgcacagtagcctcactggatggacaggtgccctcagtgtgttccccgggcatgcgtttcccacgctgagctcagaggtagctttcagtaagtgccagctggattttgtcactccttcagttgcaatcttcagtggctccccatggcctgcaccaaaatgtttataacccttggaaggtgtcagagcctgtacaccccaaccctggtctggtctcagatagtctccccagagctcccagccatcaactttcttggttttcaaatacacagtgtatcttgtgctgccacacctggcagagaggctcctcagcttggagcgtttttcttccttcatctacgtctgtgttttgtaaacttgtcatcttttcagatgttgctcatgtagcccctctcttgtgtaaccattcttattcatctgaggtgtaagttgcccactgccccaccctgtgggcctcttagcactttgtccattactttgttaaagtagctggcacgttgtgtaagcttttccgaggaggacaaggggttcatatctggctctccatggacactgagttcctggagatggctgggactttggtgcttagccctgtgctgggcactttacaacaaaatcgtgtctccattgcaaaaagtttgtatcatgttaagctttgctcgtgtagtttactaataagtgtgtatcaaagattaaggtagaaagtaatgattttgatactgcttcttagacaaagaaggcggctaacaagagccaaccactgactggagaggctccggctgtcaccgtgattattaatacattgtaatgacattttggggattccgccatattttgtatggttgccagcaaaatgttgacagttgtattgtggttaataaattcatttagatttataagcattgtttacagaacctgttcgcctgctgaaactctaacagcatctgttccttcttactaattaactgctaattacaaatgagctttgtgtgtttgtcagtataactggctcatgcattttgtaaggaacattaacaaattgatttacatagtggaaaagcaatcaaaagagtaaactgaacagcacaggtctaaagccctttagccggcttttgaatgaagcaaacttttgatggctataaatattgccataaattttccattaccttaattctttggtaaaggtacagcgatcaaaagcaatattgagtgagtaatactcaaattagagcactgcagcaggtggccgggagtgctggtgatggccctgcagaatcctttgggggccgatagaggagaaacaccaacaagtggtcctgtaggaaatgcatccactcccttgtgggaatgctgctgacttttgaaagctgcactcgtgactggggttgcttcagaacccagtcacttaagtacaggttcacactgtgatatcgaagtcagtgtctcagccagcctgctgcaaggcgcttagccgggaagtggaaatctggtgtctgtcacactttttctcctcttgggttctcagatttcaaaccgtgttgatctgtgtcatgcttcagggggcaggcatttaaagttaaccagtttaagtgggtgattccaaaagtccagggctccttcatccactcttctcaaggagcgggagaagatggagacagccctgaagaatcaagttcctggtatgttttctaaagctccctcctcgagatagagaactatgacccaggccagagccacaggggcacagacagaacaggaggaacgggttacactggtgccatttacattcacagttaactttctaggtgattcacaatgcaggtgtaaaactggagatcacaactcaggcagctggatggagagttcaagggttttttgttgggttgggggggttgtgggagggggttgagacggagttttgctcttgttgcccggtctggagtgcagtggcgcaatctcagcttaccgcaacctccgcctccggggttcaagagattctcctgcctcagcctcccaagtagctgggattacaggcatgcaacaccacgcctggctaattttgtatttttagtagagacaggctttctctatgttggtcaggctggtcttgaactcctgacctcaggtgatccgcccacctcggcctcccaaagtgctgggattataggcatgagccactgcacccagccttcaagggtttttttttgaaaggtttaggctaaatatgattaacagcggttacattaaagtaatactgagtactttcctgagagggaacgtttactctaaaggatccagatacacagttgttggcctgagccctgacactgatgttcagggtcagaacagctgggaaggtggggagggctgctaggtccagggccctaagccatggaaggagaccctacttgccagctgtgagcctcaggcaaacccctagacctcttgaacctcagttaactcaggtgcagaatgaggatgatagaacaaccctcttccccagggttgttggtggattaataagatgatggagtctaccagtaaaggaggtggcatataacaacagctcactaaataagttactattgtcatgatctctgtattcctgtgaaagtaaccacatgtaaacactagacattaaaccttattaggtcatagtaactccatatgggaggagagtctcttttctcatcaataaatttattactgttaattccagataaatgttagaaaaaaattaagcttaaaaatagaatagataagggagtacaggctcccttaataaaggctaagagggaatgtcagagccgggggtggtggctcacacctgtagtcccagcactttgggaggctgaggtgggtagatcacctgaggtcaggagtatgagaccagcctggccaccatggtgaaaccccatctttactaaaaacacaaaaaaacttagctgggcgtcgtggtgtgcacatgtagtcccagctacttgggacactgaagcaagagaatcacgtgaacccaagaggcggaggttgcagcgagcagagattgtgccactgcactccagcctgggtggcagagtgagactgtgtccccccacccccccaaaaaaagaaaagagggaatgccagggttactttacaaagctgtagtttgtttaacacatttaattgacaatcaagccatctcacaaatgtaagtaaatggcactattgataaataacaggcttgccattggtgaatattttgcctccaaagtgattttgctaaaagtatgtgtatatacagtttctgtaacatttcatatggtaggaggaagaagaggcactgtgctttctgaagcatttattcctccttagaatttttcccaggggtaagtgttcagaaaatctgaagaattcaaaataatttgctccaaaatattatgatgtgattaactacgtattgtaccagccagcatttactgaccatatgtatgtattagccaccatcagtagttataaaaaggaaattgatttagtgagatacagtctacacttttaaaaactcacaacctagcaagaaagtcaggcttgtctcagtaactgctgtgcagatctgactgtactaggtatgcactagaatgtgccaggggaaccccgaagggatcatttgcttcgctttccatgtgttacatccatccccaaccttctagtattttctacagatgacatttagtgaacagaaagcctctctctctgaccctaattgattaaagactttttttttttaagaagcataaattagaagtgaacacaactttttggacttacaagtgaaaaatccagtgcctaagactttctggtgaaatgttgccgctcgggaatttcagttggaaacataaagccattcattaagctaacgcgggtgtacgtgaggtttattcaagagataaattgctggtgtgttggtgtttagaacatcaactctgtcggatatttcatgtgaccgaggtctgagcatcagaatccatgcccatgccactgctctccccaggggcctgagtctgcatttactgtgaagcaatcttttatggaaaaaacttgcaaaaaatagaatgagtttgaaatagaaagtctgagaacacaaacctgtgcttttccatttaaatatggcacaaggagatcccaaagctgttggaccagtgattttcaaccctggatatgcccacgggtgtgggcgtgcaggcacacatacacacgcacacactccgtccacggagggtcagagtcacactcattgggcctgggtggggcccgggcatctattctctagtgtttcccatttaaaggtgttcatcagaatcacctggagagcttaaaaaagcaaaaagcaagccgggcacagtagctcatgcctctaatctcagcacttcgggaggccaggagctcaaggctgcagtgagctatgatcgcactgctgcactccagcctgggcgacagagcaagaccccatcttaaaaacaaaacgtgatgttggaggagccagactctaggctttgggaaggggctttcctggggagggcagatttgttgagaatccattttcccagcgagttcgtttccacccccttaagaacaaccactttagaagaacattaggcagaggaaaggggctcctacgtgtacctcctttccaggagatgtgggaacaggaggagtacttgccttttcatacatgaaatggttttttatttgcagattatcatttgaaagacattttggtagcctgatttccactcagaaatagatgtcaccaacacaggatgagagactcttataaagaattacgaacttctgttaaaatgagaaagtcaatgaagggaggcagcatacccagaaaaggggaaaattaaaatctgaaataatttatgaggaaaataattttccatctaagagtgtattagctgtttattcaaaacccttgatgggaatgtttgtaatcaggtcatattgtgatcttcccacagcctgtggtttctgtttttcccctcctggccttacagttaggggagttagggcaggttccctccagaggtgacacctgttgacaaccagtctttcatgacagcaagctgctgtccattctgatggcttcagcctctgtgcattctgatggcttcagccgctgtccattctgatggcttcagccgctgtccattctgatggcttcagtggacattgcagtgaccattaaagtaaagtggcttagagacataacacggcgacatttatgtaggggcagagaagacaaggctgttcctctccttgttctcacctttgcccagaaagtgttagaaacagcctcttccttagcctccttttctatacttctccctttagaagccatgcactgtggtgggtcagatctcaatactcgtgggtccgtgttgtcctagcggtaccatgttgtacttcagaagggccatgctggctgcagaatggaggctgttggagggcaggagcccaggcaggaggtggtcggtagagcagcattcccagagagagcctggtgggctctcagagttgggggctgcaggaatggaaaggagaagacatatctggaggctttcggaaagtagaatagataggaccgatggacaggttgattcgatgtggaggatgaaggagaaagaagagttttttttttttttataaatgagggacacttgtgctgaaggtatgtatttgggaatcatacagaaatagccattgaagacatgagagagtgtgagatccaggaatttggtgcaatgagagctaaggaccactggtggtcttaggagggacaaaggcagaatccccagaaagcaaacaggaccagagaagcgggaaagaaacttgagagactgttctcctaggagaacaaaaaagaacttgccttttgaaagagggagataaagtaggaaaaggactacagcatgtccattggcttgtgggatggaggggtctttgatgacatcagggaaatgatggagcagaagcggcggcagggctatgaacgatgagcaggagggagccacagcacagcaagtgtagacaccgcctaggagaggcccaactgtgatgctaaagggaggaacaggtctagaagttatcgattcgcttggaataataaatgatacagtggcgaactgttccagaaagaagttaccaacagtcgccgctcactaggaaaccctagagtagacgtacatttgatttaagttagtagcttacgggcctgatgcggtggctcacgactaatccccgcactgtaggaggccaaggcgagtggatcccttgaccccaggagttctataccagcctgggcaacatagtgaggccccatctgtacaacaaataaacagattagccaggcatggtggtgtgcacctgtggtcccagctactctggaggctgaggtagaaggatcacctgagcctagggaggttgaggctgcagtgaactgtgatctcgccactgcactccagtgtgagctgtgagagagcaagaccatgtctgaaaaaagaaaaattgtagcttatcatttagcaattcataaataattacctgtatttgtcaaacacttcgtacatgttaggcattgtaatttggctttatgttatgaatgcatttaattttcaccaagggacgattccttccagacagctctgagtttctgttttccttggttgttgctgagagcataagttatattcctgcctataggctcatccaggccgcatttcctcctgatttcctgtttcctcacccgtatcctgctgctctctctcttcccctgaagctctgggaagtcttccctacacgctcattagtgagttaaggaactttgatgtgtctccgtgtttagaagaaatcttgccgtcaccactccatgcagacgctgggatactaaggttttcacctgctgcttcctgcgggatgtcgctcatgtggaggagggcctctcgttggaagcccaggctcactccatggctgcccctctccccagcctgctggcgttgggcttcctccgctcctggtttcttagttctggagcacagactccgtgctctggagcaagagttcttcactgtggttctgtagatagaattcaggggtccgcgaatgtggctggggggaaattcattcgtatttccactgacttcgactgaaagttaacgtttccttcagatatgaatgtaggcaacgatccacagtggtgttttgttagcagaacctgtgactttgccaccctcaaaatcacagacatgttcacagcgcattgccgttgtcccagataattgaataggttgttttctctggtcaccgtttggcaatggaaggtactaggtctgccactgggtctcagtgcattaataaagcagtgtgcttattacccagccacaggcgttgcttatattttggtgactgtattttgatatgattggttcttttgtaatcctatgaatttaaacctaatactttgagaagggatcctttgggacgtgccaaaaaagacccacctgtagcaagcctccatgtggatttgagtttcttaccctatgaattctataaactgaagttttcatcccatgtgtcaggtttgttttttttgttttgttttgtttttttgagatggagtctcactctgtcacccaggcccgagtgcagtggcacggtcttggttcactgcaacctctgcctcccaggttcaagtgattcttctgcctcagcctcccgactagctgggattataggcatgtgccaccatgcccagctaattttgtatttttggtagagatggggtttcaccatgttaggcaggatggtcttgaactcctgacctcaggtgatcggcccgcctcggcctcccaaagtgctggagttacaggcgttagctgccgtgcccggcccgtgtgagatttgatgtgaagttgaggacacgggtcttcataatgaaacagaagtgctcattgtcctgttgccacccttgtcggtttttcaccctgcagccctttgagaccaaatctgcctgtgaagtcgctgttcatccctgcaggctccctgtacccccagctcccagaacccatcaccagccctccttcttagagagtggtcttcgggaggacctgagcttcggctgcggccttccagccccctgggtctcactgcttgctgcctcccctttctcacccacacaattctttccttccctccctctgtcccacgctgtgtccctttctcttcctttctttgagttcatttcagaattcctcctcggtgtctgcttattgcatggcacggtctggttgggccccactttcttcctggaaaggtattttctggggccagggagcaatgttaccatttccagaaaagcagtccagctcctcctgcacagcactctttctgctgtgggatgcctccgcctcccttcgttccccatttgcagcctctaggtgccctgtcttggccagcagcacttgccttctcttccccatcatctgtggtctttctgcacctgggctcccctccgccctgcatctgagatctctgttttaaggccagctctccctagatgtgtagccactgggatctttttcatctcatcagcctagctcccggcaggacctccccactggacttttccaagatgtcagtggacagcatagagctggggtgccagtggccaccatcgggagtcactgccacattttcttttccttttgtgtccacacttggcacagaatcttcttccaggcagcctcctgggccgccagtggtgtggagctggccgagaaaggagcctgcttcccagcatggcctcacattgtcatcagtgtcactcaggaccttgcccgctgccccagctcagagcttgaacctctccctcttggaatctggcaggagtccccaaaggaccacccaggctcagtcttggccccattgagtctgtcctccccactgctaatgaagtctttcctgctgaaagccttctgggccatccattgtctgcctgtgagagtcctcggcttgcccccacaggcctcccctgccggtctggagctcagctagtggctctcatctccactccctgtccatcttgaatgttctaaacaacgaattaaaatgtttaacttgaatgcaggagccaggcaggtacttgtcatgagtgggtttggagggggcaagggtctgggtgaacagggagggcagctcccacccacaggggcagccgtccctcacttgcgccctcctcagcctcagtggcctcgtgttcccggatggtcctggtgttgaaggaaagccaggaatttggatttgcatataaaattttatcatttttaaatgttggcaactgattccaaaaatctattatgcacttttgggggctgatgaaaatgcttctgcagactagaaatagtccccaagtcaccaagatggcatctctgcattaaacccaccccctgaccttcccacgaagctcctgcagcttggcacggcatttaaggctccccctgaccgatgtctgcctccctgtcccagcttctgtctcatccactcccaacacccaagtccctaggcatctgagtggcctcctctccgaacctgggcacacagtgttcttccatccatcactcatccacctggctggtcctgctggtccaagacatagcgttggtgctgtcgccccctcagaagtcttcctggctttcctctccctggcccgagggggtgcctcttttctgtgcctcatcccttcattcccaagatggccttctgtaagacaaacattgtagcacccatcacactgggtaatgataatttattacctttgccgcctcccccactagactctgatttttgtatgagcagcaattatagtttgctgttccttgtccccaggacctagtggggtcccggcccagcagtggggctccacatggctgaattgaacagtcaacaaggcagcctcctaacaagtcctgtgtcatcctgtttagccgttcgctcaaacagagaactgtagatggggctgaagcttagtcccaagagccacacatgtcaaggaaatctgggagcagcagcccagccatcccaggatctcacaaaggcccagcagcaagtacaggggagacagccagacccctgcacaggagtctagaggctgagtctgtaactaatccagctcagaccacatgtatggtgtgctcaggggacccccagagcaaaatccaacaccatgctggcttctgggagtgcagattttgcagacatggaagcagaaaatcatatgataccctgagttcctgagtcagcaaacggaatgggggaatgagcattgttcagccagctgggcgaaccctgggcttcctgaggacaccccattcttagctgtggggtcaccactatccaccgacagcccagccggtcgacagcagacctttccttccagttattcctttccttccagttattcctttcctgaccccccccccgatctgctttttaatttctcagtgtatgttttctggtataatctgcttgtctttgcctctcggtgacatccacggagtcacccaagtcaccagccgggactattcctgatgtcatctattaaccttctccagctgctccgagatggtcaccaagtccttcttccctttcttcctgagcatctgtcccgtcgtgccctccgaaggagtcatgcatgtggtttggggcctggatgtgtgtttgggcctcctcactggtttccaaccttcagtctgtagccctcagatatgccctccttcctgcacccccagagtggcccctccactcacccttcagctgcagccacagggttgaaatctttcccaggccctccagacctcctggatgaggcttaaattttaaaaatactaaattaaaaaaaaattttaatttcactatattctcaaacttctcaccattgcagttaccatattttactgagattgtatatttagatgtctttttctccataagtcattgagtttgaaagagacatccttgtaaatcatttactggactgttggaaatttcgatctaggactcagaagttacagaagattttaaagaaagtcatttgtaaattcttaccctgaggtttatagacccttgtgaaatgcaaaatggaatgtaagagtttgcatgtacatcttctcagaagaggttctatgggttatttatttattatttatttattgacagaatctcactctgtcacccaggctggagtgcagtggtgcgatgatctcagctgactgcgacctccacctccccagttcaagcgattattctgcctcagcctcctgagtagctgggattacaagcaggcaccgtgatgcctggctaatttttggttttttttttagtagagacggggttttaccattttggccaggctggtctcaaactcctgacctcaagtgatcatcccacctcagcctgtaaaagtactagtattacaggcgtgacccactgtgcccaacctatttatttattaaataattttttgttgttgtttttagagacaaagcccaggctggagtgcagtggcataatcacagctcactgcagcctctaactcctgggctcaagtgatcctctaaccccagcctccccagtagctaggactacaagcatactccaccatgcctggctttttttgtagagaacagggtctcactatgtgtcccaggctggtctggaactcctggtctcaagcagtcctcctgccttggcctcccaaagtgctgggatgacaggcatgagccactgcgcctggtctggttccacagttttgaagagggcctgtggcctccccctcttccccatcctaagaggttaagagctgtggattgcttgacatgtcccaggttcgacatgttgagcaaaatgctaggagggtggtgcagaggccaccgtggcagtcacacaggtagaccagcaagcactccaagactcagcgactttttgaatatagaggcttaaaggtagaacatctcatgagactttaggtttcgagaatgggtgcctgtaagaatggtggtttcattaacagaatagcaaactaaggaagaaaagatggtttggttcagaaaaaatactgctttagaaaggaaactgggactgaaaaacggccatctttttcatgtatggccattctggcttttgactctatcccaaaatacagaatgctctttctactcactgactcttgctttcaattttgtctaaaagaaaaatgattcacaatgaaaatgatgttgttacacagtgtacatactcaatattaaattcataagtaatgtgaaccacttcataaattatttaggttgaagttcattttgtatagaaaattacatctttgaaaagatatgacagggttaaaatgaatcaagtttatcgtaaaactgttctagccatagtaaattaatctgagtcattttatcaaataagaaacatttttaatattttgactattcatcactcaagcagtacagctggtgttactgaagagatcatttctatttcagtaccgtctgtagatcctgaaacgggcgcctttctgtgcttgtttgccacgacagtggctctcgtacacgacgcctaacgtgtatctcatgtgaaggtgcagcccaagccaagctccctggggctccgttttccgtttcttgaccaaggatggcagaatccccaggaagtgctcctgttcctggcttgtgttttacatgatggatcttaccaggcggccttggaagccacttctcacaccagggttataaagtcctatgttttcacagtctggttaatacaatgaggaagaattaaaacctttggcataacaaagcttttggtcagttctataagcaaatgccattcacagcctcctgagtgatacctttttctaggcactgcttggtttctgggtgccctagacagggagtatcccaccggttacactctctgtcactcgccatcatcctgaggatgctgtttccataagccatggctcatacagccgtccccactccaggttaaggtcccttgcctggctcctcacagtgccctgggcatggtcctatcttggcctagctttcactaaactgcatctgtccgtccacctattagagccacctgccagtgttgagcctctttagggattggcctgtgccctcatcactccacccacacccagcacagtacctgggatagagtccatgcaaggtaaatgaataaggaacaaggtcctactcagaggcaaatctcttctttctaacactgggagctattcagctgcctgtaccatatcagaacatgcttaagaaaaagagggaaataattattgtctcaacaaagatttgggtttagcaaaaactggaaataattcacagtgaaactaataatccattgattgtgatgtccatggtgagatcattactctcgagaataatactggtaatttagtttgctcggaaggtactattttcagagtacttttacattttccaaaccctgctgtgtgtgttgaaatgtaaatcacacagcacccagataaccagatgattttcctcgtccttttaacagaaagatcaggtgagaacacacagttgcaccttgatcatttagtgctttaacttttccccccagctagtaagtatttgaggagtttctctcatttgggctctgaatgcttttctgatagtggggaaggttttaggaattgtattcggggctgctttgttgttgctccttcctgcccatctcagtgttaagggttgtcagtatcccaagactgatttccctgtccgtccgtgtgctttggaggtatcctggccatgttgttccttaaagctctaagtagaaatgactttgttccttggcactatgttaaattggctggttaattctggtgttatttaccctgtaattcattagtttcaccccaccattggcagctgacaggctgtaatttcacgccttgcaataaaagatgtctcataatctgcttcatttagcagcaagagaatttaatgaaattaactgcagtcctaattatgccagtgaatactaaagaccgccatcaagttttctcagaaaaggacgaggtccaactcgtgaaggatttagaatataatttcctgggaaaagttgcaagtgtcttccttctattggccaacgagggccaattatgagtacacatattactataattaactggtttttttgtgaatgtctctccaagtattcattgttcgaaatcaaatgtaaaagtgatttctctatcggagtggtgtagatgatagaaacaagctaatgttaagttttcaggcagtgacctctcctgcagtggaggacaggtttgcaaaacatcacagtttgagagcaggttttcatgtgtgactctggagggtttctggagtgagcagaagcccgggcccccttatgcctgtacgctcagagctcagcctctgcagccacgacttctccatgctgcggggatgctaggcctggataagggttgccacctgctgggcatggagtgtccagcctcacccagcccctcgcctggcccttctcccttcctcatggccgctagggcaagccctcacttctccaggacagatggcctttccctgctccaccgtccactctgcttcccgcccctggaggggaggaagacgagcatggtctgggcgcccagtgctcctgtccccatctcacacatgtgtggaacaagccactcacaccctgacatgctcccctctccctctcaccacgactctttcttggtcctgcctttctcacttttccctctcagccttcttcatagcctcttcctcttccatggaggacagggcagaggaaaggtagggaggagcattgatgcctcctgagcaggtctggcctggcacctgcctttcccacccaccccacggtgtcctggccccagggctctgcagcccacagcacctcttaacagtgctgtggacaaattccggcaaaccgtgggttagtaaccggacgacgttagcaaacacagaggctgcagttgagccaaaggaatggagattctggaaggaagatgtgcgtgttccaactctgcagaaaagcagctgaagcagtgggaggtggtctgttatatctaaatgcaatggaaatctccatagccacaagtgactggcctctacctctcttccaatcttgctctactaatgcgtggcctttctgtagttctgaaaggagccatctcccctggggcagtgcctgatgtggtctccttggtccccttggtcctagcacctctgcattatgcaccctggcaggacatcagccggctggctctgccaccccgcattagtgtccatgcaccttggtggagaagtcgctctgagcagctctgatttcagaggcctcacttgggaaatgagggtgcggtgttgcttcttggtttcctaaggctgctggcaggtagggctttacaaagaagtactttaggacattttggaatgagctgttgtgtattctcacaaaaatagctgcttttgcaaaaagttttcctgtttctagtcacccttcgtctttatgccatcccatcattgggggtggtgacttcacacacatttgagatttgaaagcatgatgactgtacttcaaagttggggaattccatggcccaccccacaacccactcatgtcaagtgcattccagggagcaatgggtttccaggtccaagtccatctgggggattgtggtctgtggtgggcaggggctgactaacctgcccaaggggtttagcaagggaatggctgttccgggacctggcccagcatcctcccactgtacacagcctccctgcacaacctacagagggggctcccaggcaggctgttcatggggttggtgttcacaggactctcccacaggaagggcgctgagctgcaaaggatccaggagacctggtttctaggcacagcccagtgttagccttggacacagcagccagtgttaccaggacctctgagctcacagcctggcctagagtgcaaggagccagtggacctgagagggccctgtccaggctgtcagtgctgaatatagaccatcggtgcccacctggcgctcctgctgctcggtcggagctgggagggaaacgtggctccactacagacatggggtttgggctgggaggccatggaatggtgaagatgctaagcaaggccatctcctgggaagggcagaagcagcttggccccaggtgtccgcatgtcaccccctttccctaaacttcacccgtccaccaacgcaccatgtgccgcaggcgagtgatgggaaaatggccctcgtttcagagaattttttttttaaagcaaagtgtattgtgtgttcttgcagttacttgctaccaatgtcccttgggtatctccccccttggagtgtttgcagccggcgagcgccaggatgcccgcggcagcatactctaggcttatctccgtgtgtgtggccctgaacccagaacacccggaaatacaagtgcaagtgcaaggagcccatgaacagaaagaagaagaaggggacggggaagcgcctcttgactgctcgccataaaaataattgagctgaaattaaatctgggggctttggtagcctcctgttaggaaaagaaataaaacccagtgttttgatgcacacctcgcacgtctcatctgcagtacgccagaggtaattttggcgacaagcagtaaggaaacctgaagtatttctctcccagaccctcccagcttattaaaagaacttatagacatgaaaatacattaaagtgggcaaagcggagagagggtgaaagagattaacaacctccgctgaatagagcccattgatgaaacaggcctgtgagctgctgccgactctgaaacaaggtgccaggaactgaaaagaaggtcaggcctgtccagaatttaggggggaaatggaaatgtatatttaaaactaatatatgcctgagtgctcatttttcccccgtttctgattgggaagatttactcgggaagaggaaaaacggttctgtagccgattacccaatttgagcacccaaattaaaagattcacttaaaatgcagcagagacaagcgaggcagcggagaagggcccgggcgtgcataatgcctattgtctgcgtctgcgtttgctttttaatgccagcgcccagcgagggagcagggccctcctagcgtgcgcggagggggcttggggtggaaaggggggggaaccccgaaacaggccgccttttgacaggcgcctgacaggtatgggtgcctttggagatctttttaggaaattgggtgtttgcgagtacaaattgaagcaagcatgctgtgtgtgtatgtgtgcgagagaaagttagccgtcagtcaagttttatctcttaatgaatagagactgctgaagtaagggttaggtaattgagtttataattaattagccataaccctcatcagataaagcagttgtgaagaattttttttatctcctttctctccccagggcctgcccttctttgtccttgcactgacagccagcacttatctcaggcctgctggagcccgtgcccgtcagtcctccccctggccagggccgaggggtggtcagaccagcccgcattgtgctgaaggcccacaatcagcccagctgtccggggccatgatgaattagcggtgggagttaacatagaggtgaactccagatcggccgatagcttgcaggccgctgctgtttgtcctgacttcagcgcatctctgatagacctttgacaccttccaacaaagaggttacaggagggagagctggagaaatggagcgctcctccagaaagttcggcaactcacaaaagaccccttaatttctatagcgggcaattcagtccacaaaggaaggaaatcaatgagcgtttacgctctttctttgaggaacctttttttaaagaaaaaaacatttactggcgctttgcatgttttgggtacaagcagtggtagaaacataaaacattaaaatccaagattgagcggatctgtcttgactgcgttttatagactggatgagagaaaaacggggtaaaatggctccccctactctgcttcaagatttgaaatatctgactcaggcaggttgagtgaggaattgttttaggaacagggaatgttgtgactttcttagtactgagttggaaataatgtcaacttccttgtgattttagttgttcctttctaattaacccccaggcaggtacagataaatctctcaataccctagggatgcggcagataggaagatgtgagcctttcttttcctcttctacagtcagtgttttataatagatagattaaatggaagttttgtttcttctttgttagcaagactagataccacttttccagaccaccctatggtaattatttggggacttaaggccagaatgttttatcagacaatatgactgaacagtgattttggatgttaatgaaaatttaatcagatgaatatattattcagcctcatttagggagtaaagtatgataagtgcatctacaagtgctgaaatttgtagaacaaatgaggtcatttttgtgaagtaggctgagaacagactggtgtgtgtggatgggggaaaggatggtcgctagcttgttttggttttaagtgtaggctataccttgaattaacttgggaagtactgttactagcgacagtccctagtcattcattgcagacttgttgtcagcctcccatgtggagatactagatgccataattgagccatacctaacaattccaagtttttaatgaagcaaatatggtaaatatgtccgttccaggctttctttgagtgtagaaaaaggaagttgatgcgtaggctcatgggatgaccccgccttatatgactggataaaatccaaatactcagctagagagagtggagccgctgtgttgagacaggcactccccctcagcctccccttgtcttcccgggctcgtggggtcacctccagcaaacccaatttgaaaaccggtgatcaagtgttgacaactcctgtcacagctgagaaacttaggccttgttcaaggtcacatggagaaagaatattgcatggagtagaccccgctcctcccccgcatccaactgaacgtgggctgtggtcctgttggctccctatgggcctgctctccttccctctttttctccccgatagatgggacctgtgaggcctgtctctagctcagcttggcatgagatgggccactcctgccagctcacctccctgctggctatttgcccttcatcacagaggtgggggaggatggctgcctcattccagcctcagctgctattgtggctacaaaggcaaagccagctctacagcaggcccatttcagcgcattataggaaaccagaggctttaaacccagaccagcttggagcctggggctgccgcgtccgcttaccagtggtggacttggggatgtttcttactctccgagcttgacttgctttatctgttaagtggcagttgctgatggcagtgaattgtggagtgataggtactgtcatggcacgagctcaaaagtggctgtttcccctggtttcgcttgtttattattagtattattttcatagaggagttaatggagcaaatgagaaacaattctttattcattcttagttttggagtctgcatcctgtacagtgtcctcagaagtgtagatcgtttctgctgcaggagcccaggacgtttggtcagctctgacttcgtcacgtagactttgtgagagggagggtgcttcagaggagggcccgccatgaggtctgcctccttgtatttgttacttctgaaatcttaatgccagttattttaaactagggtgactaatggacccttatttcgtgaaggaacagaaaagtagaaaaggtttaaaggcaaaaaaagctgaaggtatttgtctgtgatgttcaacaaaccagcctcatcaggccccaggtggaaaatcggcgtggtgacgcatgtgctgccatcccttggggtggcgcacggaaatggaagcgtgaggtcatccctgtgatcagtaacaaaagtctacctggaaaatggttactttgattttccagggagtgagtagtgtgacaggcatgtcaaaattaatcatcagtagatttattcaaagctaaaagtcaactgaaattctaagctctctttgctatactacatttaaagataattgctaaagtttctttagatgtccttattcattcagttacagatttatcatttttcaaaccaaattctaaactgtgttacgttcagtatgtttttgaagtcataaaagttgagttatagtaaatttaaaatcgagcaatttctgctttaaatatagggtatcattctttcctttagattcgttgccctgaacttttgattttgatattataaatacacagctactcatctcattctcttatctccactgtgctgggaagaccgagaggctgagcagcagctccactgaattcaagtcagaggatatttgtttgaattggagactgggtgttggtaaatgggtgacagtgacaagtgggtgattggggacacgtccttgaggctcatgccttagaggaaatgccttgtttaccctatgaggtctctagatgcacggaggctactgcattcccagggggtcagccttgtctcagaagtactgagaatattattattatcattattattattattttcttttgagatggagtctcgctctgtcacccaggctggagtgcaatggcatgatctcggctcactgcaacttctgcctcctgggttcaagtgattctcctacctcggcctctcgagtagctggaactgcaagcatctaccaccacacctggctaatttttgtatttttagtagaggcggggtttcatcatattggccaggctggtcctgaactcctgaccttgtgagccactcgcctcggcctcccaaattgctgggattacaggcgtgagccaccgcacccggccgagaatatttttaaatgttcatctcaagttagcatcactgaagctatagcttcctctctttagtttgttcttgtacccagtgattcacccagaattgtttgggttttccatataagaaaatgtgattcgcttggtgtcagtaaggaagggattctctgactcatagaagcaggggtgtcaccccaaacagcaccatgaggaggatagcctgagtccgatccctctgggttggggctgccatcaggatctgtacattctcatgacctgtgtgcttaaacttgggcccttgaggttcctgtcctttccacatctaagccagcagtagactcaaaccgaaggtccgttaatgtcctcatcagtcgtgagcagctctgtgtggaccatctgcctgtccagtactgaaccagttcctgtgactggggctcattgccttggcctaggccacatgttgacccagagtacacaggccaggatgggaaagggtcacctgcccatgcagagtcacaggtcctggccatgagcacaggagttggatgtaggacaaccaccataaatgtcccttgcccaagttgtcatgaaatttcaaaacttcagccagtgttccctgcttgacactcagacctgaaggcctcctgcaagtgccagccactgtcgtgagctcaggtgtctgagagcacgcttggttcccacgctgcggtccggttggacgtggtagatgtgagaccagtgcctgaaagaatgccgctgtagggaaacatgaagacacacacactcagccacactgtatttaatgggccgggatttgtgtaagtgatctccatggagacgcaggtggtgagcctgagatgctacactttagagcaggagtcatccactcccagatggcagcctggtaccagtctgtggcctgttaggaaccgggccacacagcaagaggtgagcggcgagtgagtgagcattactgcctgagcgctgcctcccgtcagatcagcggaggcattagattctcacagaagtgcgaaccctattgagaacggcacatgcaagggatctaggacgcacactccttatgagaatctagtgcccgatgatctaaggtggaacagtttcaccctgaaaaccatccctcctccctatccgtggaaaaattgtcttccaggaaactggtccctggtgccaaaaaggttgggggccgctgtcgtagatcctttgacgagcgtccccaaggagacctcagacacaggttcctgccttgcagggtcctgaccccgaccctcccgttgctcacagtgtgtgtgcatgtccgttgagcagcttcccaccctgattgcagctgttcctttttaaacagaacctgcagaagtggatacaccaagaacatggatgcattgcatgtcacatgtatacattgtctgtttctccacatatacaccataacagaaatgacacagaagagcacctcctcggtttgccaactagcttttgtatagcagcaaattcaaagtcaactagtgatgaggaaagactggaagcagctaataataagcattcttatgtaactgatttgcaagaatgtagtacagtcgtcatttgggaattgactgggtataaagagttttccagtaaaagcgctggaagaaccagagcctgcagaagcaggcctatcgccctgtgccatgttttttgccacactgtctgcccatgttgggagtgtgaggcttatacccagggctgcttcctgggtgatcttgggggattttcatttttctggtacaggactggagagtttatgagatacaccatgacggtacagcatttaatttagtatcaccacttcgggagaatgtgtatcttaattgctaaaatctctaactttgtataaattcaaattgaacataatccagactatatagcaatctttaatgaattccatcatcaacattaccacataaaggaagttaagttgggcgtataaaatcgtaattcagtaaatttttctttagttagtaagcagattagtattcattgctaagatgcattttatcaacggttttggtagcgttagttaaaaaatgtaagaataatgctatagaacatgaacataacatttttagagaagtatatttatcaaactttttagttgcacagtttctaagggctgcttactgattaaaaacatttttacttataaaaatgtcagcctgttttatttaagataagacattgagctttcaagttggcaaattgatgggcagaacgtatatatcctgtttgtacatgtttgagtttaagatgcagtaggttagggggaaaatgttttaaaaccatacagaatttaggaaacagaccttttaactaataactgttactgagagatgataaaaaaaaatatgaactagttcacaatgaattatattttgtatgcatgattgtctgtgattattaattgatgtgtacttcctctttgtcaaaagttataatgtatccgtctaccatgaaaggtccctagaacatgaaaggtggtttctctacatgcctgtgaaattgatgagcagggagaggcttactcatattttaatgccagcagtaacagtgctcacacccagagatcaggggcatcaaagttggtggtagcaaggagtatttgccactgtaattgacaaataatacccctcataaatactgccagtcttttcaattagttttcatctaaaattctggctacaaaatgatggcctgtcaactgacaatgaatggcaaaaattaataaattgtcttctaaatagaatggacacttaagaaaaattgggcagccaatttagcacagcatgaagcaaggggaaccctttgtactggtgccgggcactaatgttgtctcgatctttattaatggtgctcggcggctgctgacagttttgttgctactggcaactttcttcattaaaattaaagccagcatcaaattccattagccgtactctgggcaccttgcattttttttttaatacatattgtttcttttgttaactccctctccacccataagaagttgtcagagaagttaaatggaaggaattgtttgctaaggccagagaaccattcactgttgttgtggggaaatggccattactggcccggtgagaacccccatcctgaaatctgcaactctccccccacaacctccccccccccccccgccttttgttccatcccctttcaaaatgggagcatattacctctaaaaacgacacactattttggatctgcagctttcagataggaacgactaattggtatgaggccttctagtttcttattttttctgagcagttttttttttttttaaagttcctgcttcccttttctaactgtatttccatagctgactataccttaacacaatagtaactcaatgctcagagagactcgcatttgtccggaaggccttagagttattttcccgaaggcattacttttatctgtagaacaaatttcaacctttgaaggaaaaaatcgagctttgctgaataagttctgaactattgtctgaaaagccgttgcctgcccttcacagcactgtgtacagttcaaaaggctctgaaatgcctccgccctggagctgctcctctttcgccagcaagaggcaacaaacagctctgattctaggacaactcagttcttggctgtgcgcagcgccttccaccagcaagcagaggttgtatggccactgcgaatgtctcttgtaaaggaactaggctgggatcaccatccccatgggttaccttcccctcccagcccagtctcataattgctttcttctgtcctcagtaatgctaagtttaggggctaaaccttcatctcagtttgttttcttcttctcctcctcctcctccttttaacttgtatcttacactgaaagaaacacaaatactcattaaaacagtgaaaagatagttgtcaagcaacaaaggaaagggcataccagaaaacatacactgagaaataaaaaatataactttatctctgagcatcctagcactcaaggcaaaaaggaagataataatgctgagctctgctggaagtcattacgtaagtgcgttcggtatttcctttaactgttctaacttgaaaccataattataattaccttttttttttgcctcaaggagatggcttatggattgaatatgaggattacctttttctaactgcgcagctttctagtcaccactgtctccccataccttccagtctcacatcacagatacgtattttattaatggtatctaggatagtgttaacaggagtctaacaaatccagtattgtccttgtgaatcttattctcatttgtggaatttctcaaaaatacagcaactgactgagattccaaacagctcacaattaaagacagtacaatgttttgctttacagagaagtggcagtagtacagattctgtttttttgtaataaatgtttctgacattttaatagtgaagtaaattaatcaaataattgcaggaagattctgctattcagccgttcttttttgagtaatcttaaataattaaaggaagaacaacatgccaaatgatggttcaattagcatgtataaaaataaatatttaccaagactgcattatttgccaaaacggagatgtgcaattatttaatattgttgatggggcccataaaacaaatagtaccaaatctctccctgtgtacggccgtcagcctccaagggctgttctcccactgcagacacccctcctcttaccaccacaatatctgaaccaggcaaggagacaattgttacttgatgactgagcccactaatatgttacaggaaatggggcatgaaatgcaatactttatatatagtatgtactgtgtgagtcttccattgaaacaaggccatttttagcttgctgatacaatatttgcagtggttcatcattcgattgtcctgattaacaatcaacttctataggggaccatttgagtagtttttttaaatgtgatgaatcagaggatttgttcaacatcacttcatcctcttctttaaatggtaattggcacttgggaacttgggagtgaaataaggtgtggtctgttctatgtggtcatttccagaagtgccgttttgaccactgctgtgcctttcatccagatttttgcaactggtaaaggtgtcacaggcaccattgaaatctactccctcatcagggaacacactcttgttgatagcaacagcatgcaatctctgttacagcctctaagttggaacagagaaggctttcgtagaggacatttggtggaaatgaaacacatccaagctgtcccacgttaactgtcacctctgtcacccacatgcactacctatgtttagcagggcagcctctgcctgtgatttgcagggagcgcatgctgacagctctcttccctctccttagttccaggaaggtccaggcagttgaactgactgcttgtctgtagaaagacccactgtgtccctgggggactggtaggtaccctgattcctgcttatcaggggattgattctgggcatgacccttcaccttctctgtgcatatctgtatcttacctccatctggtcactagttccagtaacttggcatttccttaaatgaaacattaacatctgtagaaaagatctctctgacatgttagatgtaacatgagttaaaaagtcccatttgggaggaagagaaccattggggaccctgccccgtggggttcctgagtgtcctgggcacctttgcttgagctcattcttttcgtcagagatcaaaaccaggagtgcctccttcagcttgtactaccggatggcttagcacctggcgagtgagtgtctcagaaaggaaactgcaggagtgcattagaccactcaggggccctgctgtcctgggtgttcatccatggctccattcatccatggctccgtgcacgtgcagcccgggaccatgactctgattcgatgcactttgttttccagaagcacagtttgtcttctaacttctaatcagttcgggatggtattcaaatttccaagaaattaaattatttgtagtaaggagttattgccagtagcagtggtagcggtccttgtcatcgtcatcaaagtggcggtggtagtaatagcagtataaggaaatatttgtgctgctcgtaatgaaacgtgcacatggaatgtttctggagatcagggccagatgtagggtgcattttccatgcccgttctcatccgtagcagagactgcgtggagtgctgtgttgagaaggcttcggaggctcaggtgttgcagatgccatctgccatcaccatggggtagggcagtgcaaactgcaaactgtcccaggtaccttttagccattcttggtttaagtctttaagactaaaattgacacatggctgtttgtctgcataaacctttttctttctttaatcaggaggaaagtgagtaatccttttcatttctccagtagaacctctagtccatgtctgaattgccttcacagaccatatgcacctttgaacttccgtaatagatgtcaggatcctgagggcagccctgggttgttctttatgcctcttcacatccagggtggtgctgtccactcaccgtgcgtgcattgagactgtttgggttgctttgctctctggtgagatctctgtgtgcatgctttttctaatctcctctgctctgtgtagggcagggcatatgtatgtagttatcataatgggatttggagcccacagacaatgtggcttcccctttactgctcactggttatattaccttgcccaattacttaacctccatgaaactttttaccattcatgagatttgttagaatcattcagtaattcattcatcaaatactttttgaacatttgatatttgccaggttatgggcaagacgggagtggtccctactgtccataagctcatgatgtagcaactaaggagccagatggcaggggcatcccacgtggtctgggaagccctgtcaaatggaaacacagtgccaaccacaatgtgatttccattttgcaggggcaggtacatgagaaaaagtaagaagaaataagtgaatctgaagtttattttaatatgctttatttaacctagtatatccagtgtttgatcattttagcatataatcaatacaagaagttaccttgcgccctacagaaccttcaaaatctggtgtgtagttcacctatatagcacctctcggctgggactggcctcccgtcgagtcctcagttggcacatgtggctgagggtggccctgtgggatggtacaggtacagcctcctctttgagctagggatgatttcagctgaccaggggacagacgctggctggggttagggaggcagtgtgaggtgggcctcctgggcccgaggtcatcgaaggccccggtggggagagcacatggctaactacgggtcgctggccaatgcaaggcagcagcatgggagaaagccctggtgtgaggcgggacacctggtttgcaggctgaggatgtgccacctgtgggacaccaggtagtgatgtctgcagctgtggatgagaccttctaggggaagagttaactcggaaagaaaggaactctgagcattgaagagtcaggtggatgaaaagttgccaggaatggaaaagagaaactagagggaacaagggaagtgtgtcattcaggaactttctgtatttaaaagtgtgtgttggagagaaaggacaaatcttttatgcggaggacttgtaaatattttccatagatataaaagtcgacttcatagcttgcctggtgtgctcggttttgactctatagatctgacttgaatgcgcaagcgggccgttcccacgtgatttaataaacagttgctgtagcatgtgtaatctttgcagtgacaacaatttagggatcattcgctagaataaagcaggagcagcaggttctgattgttcctttttcaggaattcctccctgccatatccatgtgccactgtgtagtcccgtgaactctgcattttcgcagaatgcccccatcatgtgaaggggttcggctcactctgtggccggcctggaggcctgggtgtgcttcctaggcaggcagttggattctgtttaattttctttagctatgggagaaatggagtccatttccagaccatggtaagtgcccgttggttttgtttgcggttctggcctccagggcggtctgggtgggaggaggaggtgggcggccggaaggtggttgagcgtttccgctccactgcgcggccccggagcccccaaacgcaggtcagcatggaggggcagcctgcagaggtgtcaccagcagccattaagtgcagatactgtcgtccctggtgtcgtccctgaaaatcttgtgacagggagagacagagtgaaaggaaagaaaaacgaggcgatcaagagataatattaactagaaaaatcaagaggggatctgtcagtcctggtgggaaaaaaaaacattttgtttttcttagtttccttttccttttcttttctttcctttggatggaggaggtttggtttggtcttagtaccccagcatacagtagcttcattggctttttttctgcccatattcaaaattcctttgattagcatttggttctggttgggacttaataatgctagccagacctaatgtgaaccatacatctcgtcggcattactcatcgtcaacatgggtttttaaaagggaaggagagaaacacaacaaactttttatttctttccctgtcattgttcttggtcttgttattcagtggacgctgtattaaattggattctgtgtccatcattattaaaatgtgaagtgtgtcggtcacaaagcatacatttcggggcagttagctgaataattcttttctttattatcccaaattactgctgagctctggagaggggagcagtttagccaattattgccatttgagctggatttgtgggtgattagctcctggccgaatccagtcccggccggcgctttgaagcctgtgctgtgcgattttctcagcagtgaggtaggaatagacgcggctaatgacaggaaggtcgcgcgggtgagctgacctgtgtgtggcgcagccttgggttccgcaaatagggcacccacagtaacacgtgtggcgccgaccccgccgtgcgcaatcggggctttatacgattgctggagatgctgacagctcaattaaagtgtaaccctttgtgccctgcaacctggcacaacgacagaaatattactcgccggaaaggggagggggtctttggggagctggttaaagatccagaatcggcccctcgcccctttgcccctcccccaactccctccactgtacagaaggagctgcagaaaagcctccatttgtaaaataataggtgctctggaggaggggcagggcgggaaatattactattttaaaaagctcagttaaggggggattcctgctgttcctatggaaacactttaaactagagagaaagttaaaaagatttagtagcggcagagcttgtgtctgctggtcacattttctagtcatctccttttaccaaaatttacctcccagcatcgtggatgtgaatttgccagaagttttccgtttgtggaggactggggaaagccagttaattgggatgtgtttttgcacacaacgaatgatttctatgttatcgatttacttctttcacttaacggcattttctgcagcttgaatgaaagctgtctcgatccatgtatgtctgtgtatctgcggtctggtcatttttgccacacttgatttttttctgctaaaccctacgtcttgcagtatatgggtcactcatccagatttacttgatgctgttttagttaggcagcagcatgcgatgccctgtgcgcatctttatttttggttttagatttttggtggactgctttgatgttttattttctgagactaggagtatctataacttggtgtggttattcttgcaggttgagccgggtgctagctactgatgtgggaatctgggagcccgagccgactcagacagtcctgactccccagaattcccaccgagggagacaatccgtgtgtgtgatcggggtgttctggacttgaggtacctggtagatactcgggggagtgtgtccagtacggaatgggaattgagactccagcaagtggggaagagacagcggaagtccccagtgtgacaccagggcctgtggggcgtatttggtgagactggtgaggtcagcattggaccacctcccatgctgggtgccatcagtgtgctggagggggaagggggagacagcatttctctgtcctagagcagtgcacagcctgttcatgcacctgtgtgtgtgagtcagctcaaactgccataacagaagaccacagactttgtcttaaacagcaaacatttattgtctcccaattctggaggctggaagtcttggatcaaggcctcagtgggattggcttctcctgaagcctctctccttggcttgcagacagccatcttctccctgtgtcttcacgtggtctttctccgtgagtgtctgtgtcctgatcttttctaataaggacaacagtcatattggattagggcccatcctaacagccttattttaacataatttgctctgtaaaggccctgactccaaatagagtcacatcgtgagtgctgggcgttaggatctcaatatctgaattagggagtggagcacaatgcagcccataatagtcatcgtctaagggatgggcgtcggggggtgcttgcttatgcggagcctgtgaccctgcagctcagcatgggaggctaaaggggcgctcaccaggatggccagaggaaggggcaggatgcaagaaggacatttcaggggaaaagaattgaatttgccaatttacattaaagtttctggcctctgattgggtctgcatggtttcctgtcctgtagcagtcttctataaaaggctggagaggaggtatgttaggcttcatgggtcgtgtggtttctcctgaactacctacctctcccagttcagggcaaatgcagccattccaaccaatgaacttgactgtgttccgataaaactttatttacagaaagaggcagaggatcagatttggccgacatgtgggagcttgccggccccagtcccgtaggatccccaacgctaatagtctggatgagggtgcacaggctgtgagagttcctgttaggcgggaaggctctggcccctcgggatcatacaccttatgctggtgctgcagtgtgtgtgtgtgtgtgtgtgtgtgtgtgtgtgtgtgtgcaagtgagggagggtgacccccacaccaagcacacagggccatggattttcactgtcttgggtccaggcctatttctagctaagtgttatctgcagggtatagcttagcataatgagagggcaaaagcaagatgactaagtgttcgttacggaaaagtgggatgtcaggggagcctcagcaggggcatcacctggatgtaccattttccgcatggagctggtgccgtgggggaagaataggtcacagcttgtatgacccgtgtgcttctccagtttccaatgatgacattccatccacccaccacccacccagatgcgcttctctagttttattgaggtcagtttggttcctgtcagccacagttttaatacatgtttatagggggaaaaatcttaattagaataattagaataaaattattaaatgcaaatgtgtgattggtactcacactctttggatctcagttaaaggtgccagcttttctttgacctattttagaacttcatagaaacctttaacaagaacctgttccaaagtgtaatgaatgcaaatcataagacactaaatgagctattaacaatattcactgtaaaaccaccgaagtactcaaacatcactttttttttttttagaagtagaaacatttttgaacttgcatggatgtttttaagccagaaaaaactttttttaaaaaacttggtaattaggaaactattagtgctcctgcagcagcaagaggattcatttgatctcattgcgaaatcacacgtgcaccgtcctttacattcagtcagatgcatgcacggcccccggtgtctgttaaagccgatgaggaatgctgcccgcagagcaaaggcgagtggttgtggacgtgcctgttgataatctgatcttgacatggcgccgcctgcgttgagactgttgctccatcaccccgtaggagcttagccatgaaatgttccctctgtgtaacgatgatccctgtgcgagcagaggccggcaccatttggtccctgagactcaaaacaaagactgatttgcctggttaagacccccagtctctaatgcagtcaataaatctttgttggtaaataattgctatcgagcagagttttaatataaatttatgagtggtgttttatcacagcttggggctgcagcaaacactgagtgatgggtttcagatagcacttacattcatgacattaactttgtaagttatttaaagcttgtacacttaacattgcttttggctttcaatgacctcttgggactagacaaagaatacacatgacgaataaagggattgcagccaaaagacaattctactctttgctccactgtagaaaaggttccttgggcttaaagcaagatgtgcctgcctggaatcctgatattttggttataggtcattaaaatcagtctttctgatatgtcagtaaattaggtggtaggaattagatcaacatttgccatttccaagtaacataagaagaataatttgaggtgtcacaaaacatttgaaatttcttgctttacaaacaagttaaaatttgtctggtgggtgaaatggtttgcagggaggcagcatagcagcggggtaacaagtataaacccttggtttgtacctcgaatcttgcgcctgtttcttccccttactgccgtttgggttatctattgctgggtaatgagcccaaattatagtggcttaaaacagtaccattttggccaggtatggtggctcacgcctgtaatcccagcactttggaaggccgaggcaggtggatcacaaggtcaggagattgagaccatcctgaccaacatggtgaaactccatctctactaaaaaaaaaaaaaaaaaaaaaaaaaaaaaaattagccgggcgtgacggcaggtgcctgtaatcccagctactcaggaggctgaggcaggagaatcacttgaacccaggaggtggaggttgcagtgagccaagatcgcgccactgcactccagcctgagcgacagagcgagactccgtctcaaaaataaaaaataaaagtgccaccttattgtttatcatgattctgtgggtcaggagtttgggcagggcatattggggacagtttgtccatgctccacaagatactttcttagggctacagcgtccaagatcatttctttactgatgtatctgatgcctcagcaaaagtggcacagctggctggaggctgacgtgaaaaggtcactggcagtcatctatctgagacctcagttcttcctcaaatagtctcagggtgtctcctctttacttggtctccccagtaggatagtctgacctcttaacaaggctgcgcaggcttcccaggggtgtaaagcaggagtttccaggcctccttcaggctttggccaggagtggcacagcataatttccaccacattctgttggttcaattgagtcagaggacagagtgatcacacaggatatgagcaccacgggggatgagggggctggtttttgtgtgccatcttcggacactagctacttcactctaccctccttcctgcaaagtacccacagcctgtccccagctacccaaagtctcaagccattatggcatccagcccaggcttgaagttcatggccttgtcgtctacaccaggtacacgtggatgaggttccttgcatgtggtcctccccatcggaagaccacgatacgcaggggacaagttatctcacacaccatgcagtggtgactcaggaacaggagaactgcagcagatacccttattctaaaaaggtggagaggctgtaatcccagcactttgggaggctgaggcaggtggatcacctcaggtcaggagttcaagaccagcctagccaacatggcgaaaccctgtctctactaaaaatacaaaattagccaggcatggtggcacatgtgtgtaatcccatctacttcggaggctgaggcaggagaatcacttgaacctgagaggtggaggttgtggtgagctgaggttgcaccattgcactccagcctgggcaacaagagtgaaactccatctggaaaaaaaaaaaaatgatggagagggacaagagacatggaatagtcactgggccataacaattctgaaatccagccagcacatgatgctgattcaccctgctctgggcataagaactgtatattctccccaggaggcatcctccttggcccttggctctgccctctgcctttcccataagaactgacccatgtttgctactatgcagctttctcagcctgcttcctgctgtacttaaagttgagggcccagagaccacttttctttctgaactttctctgtgcattttaatccaagatggtataattcctttaaaaatcttgtgggtatcctttgtgtcaaatcataatctgttccattaaacaaaagctaatgcacagatttctctctctaatccatggatctctaatcagaagggtctgtgaggcattgccttaaaatatttgagttctcaaggaaagggtctgactgccacaccattgaaggggtcctcattctgagatcacagctactggcatccccaggatttgatcttagttctgatgccagttcttactcaagggttttctgctgtcaggagaagctgggaatgagaaactgttttgtgatcagtccagcaaggtttacagttgaaatattttttctaattgtgctggaaaattccctggacctcctctctctcctcccgtatttaacagagccaggagcacttccagcatctggcatggcaatctggtagctaggtgtgcaggctcacgaggcactcttgctatgctacccatccccctgcgtggggtggccgggagggggcaggttgctaattgccctgctggtacctgttctgccggccccatttccatcctaaggtagcattttcctcactgtcctcacaacttccactcatgcttcttacatctctgccagcctcagccaactgcctagttccaaagccactgccatgtgtttttgatttttgttacagcagtacaggatgctaattctgtttttcttacctgttgctgcataaggatccaccctgaaacttcagggtttaagaaaatgatcatttgactgtttcttataacactgtggctgagacctgtggacagagcccagcagggctgacttatctgtcagagcttcccaaggcaccaggtgctgctaggctttctcgagaattaaacccaatggagatagtgttattcccactgatgctgttagctaaagtgagtctcgggcagcccagggtcagtgtgggaggatttatttatacagggacaccagtgccacgaagtgtggttcaatgggagccgtctttggagaacagataccacgctggctgtgcatgttgggcaagttacataagcagtctgtttcagtgtccttatccatgaaatgagaatcgtcgtggatatcagttgtgattgcagttgatgaaatatgcagttgtgaatactgagagattggtattcatactctttggaacccagttaaaggtgtcatatcaattcctgtccatgaaatgaggataatcaatgaccatctggttgtcatgcactttcagtgggttaacagttgcaaggcacttagagcagcagcatctggttcagagtgagcccaatattgcatagaaataaaaaaaaaaagttctaaataaatgccgaagccacataggagtcaaagaaagcgttaactgtaattgatgtcttcactgtgacagctggacagcaagaaagaatcttaagcagagatggttttcacatgtacaaaagtggcatctgaaagatggacaaagtatgcatggtgacatgccaccatgccgctggccctgggttatgcagaatcaaaaagacttaggatcacaggggccattggcactcactgacaggaactctcttcctgagcatctcaggcagagccttccggcctctgtcatcttctggccagtaggatcacggcttcatgtcctctaaaagtttcaaatgaactatttttagggttttccattttcttggtccttagagtaggaagtgtgaaagttcggactgattgaacatagaggaggctgtctgcgcgctcagcccagaccagtgggggccaccttagtaccacttcctccctaaggaaagcgacgggccccctgtcttccccgattggtttccatttagctgctgcacatgggggatgctgagtgtgttcagaggggcgtcccatggtcgaactggaacttgctttgggaagagtgtggactaagaaggggcttggcttgtgttgccacatgtgagaagacctctcaatggggcttttgtggtggctccacggtccctgaaagtccccactggctcagtgcagctctggaattaggaaccagccgtgccccaggagggcagaggaccctggctctttccaagggagatcatccaggcagctctcactgctgagacctatggacccctgtccccagggtgcttatgcagagactgcgggaccccaggtggggatcatgcaaaacatttttgtagcagattcagggctgaatggtttaacttctggggtcgctctagactgaaattctctgattcccacttggtacaaacactcttcaaaaatcagtgttcagaattaatttaagccaagaaagaaaaagcatgtttttaatccacaaaagctatttcccgagtctgctcatttgtagtccaattgaacctctgattatgactgctcctctggcctcctgcttctgaagccccagccaacgtcttcactcatcagagagcttctgtctcatcgtacttttgaggaacagccttttaaaattatttaaggagagacaatagagagttttgtagtttttcctattgttttggcaaacttttttttttttaaaggtttacatgtataaatgcagacatggactctctgacgtcaaagatctgtgggcattaaatccacagctggggagtccgggctttcccaggattggggcccttcaaggaagagcaagcctgtgtaataatttggaggcctaagttacccgactgtgggaaggccagtgccgctgtccagtccatgtggaaggaccttgatgtcagtccagaaccacattttcgttttgtttttgagacgaggtcttactttgtcacccagactggagtgcagtggcacaatcacgactcactgcagcctcgacctcctgagctcaggcagttctctcacctcagcttcccgggtagctgggactacaggtgcacacccccacacccggctaatttgtgtatttttttgtagagacggggtttcaacttgttgcccaggctggtctcaaactcctggactcacacagtcccctcgcctccatctcccaaagtgctggggtcacaggcgtgagccatcacgcccagcccagaaccgcattctgttttttgttttgttttgtttttgtttttgttttgagacagggtcttgctctgtcgccaggctggagtgcagtggcgtgatctcagctcactgcaacctctccctccaaccaattgccctacctcagcctcccaagtagctaggtctacaggcgcacaccaccatgcccagctaattttttgcattttactagagacggggtttcaccatgtttaccgggatggtctcgatctcctgaccttgtgatctgccggcctcggcctcccaaagtgctggggttacagatgtaagccactgtgcccggcccagaaccacattcttgagctgagctcccgagggtacctggtgatgtagaaggaagttggcttaactgggggcgctgcagcagcttctcagacatggctgccctcatgcctccttggggccagggctgtggttatagttgctgtccatcactctaggtgctttcacctaggcagagcaaccgaagtgcactttgcagggagctaagaggctcggctgctaacagcagacgggtttgggtgggactggagtgagctcaagattctgtgcaggcctcacttggatcagctgctcctgtccttaggggtcaggacaggacttcgtcatgtttctggctttgccttcatctattctggaaatttcaagagaacctggacatgtgaatgtgaaagagaaggcactcatgtatagaactcattacaaagatagcattactcctagaaccaagataccatgagtgtgtgtgtgcatgtgtgtgtgcgtgtgctcttgcacacgctcatggatcaaggcagaggatgagtttaaaaactggtactaaaataccctcttatcagagaaattgtcaatatcatggccccacatttccattagataggcagtaacctcttgtgaagcggaagcaaactagaaacagctctcccaaacgtgggcaaaaaaagaaactagaactggttgaagactgagttttgggagaagaaccctggaggccaaaggcagtattcctggggtcctgggatggagagagccctgtcaccccctctcccccatctgcccttgctgcaaggaggaggtcagccttgttttataaatgaggtcacttttcaaccttactggtccatggccctgtcctgtttctgtatctgccaaccagagagcaactcccgttgtttgttttcaccttttagaattcctgggactaacaacaattgtaataaaatcgatggtattttaaattgttgggatgaacaagcactttgggttcctgagatcttaggataaaagcccaccgaggtgcgagtctcaccatcgtgctgtctgctgagagatctgattcccagcggaccggccttcctcactcgatgattgtcagggctgagaacccagcacaggtctgtgatgcccacgaggctgtgcggctcagggccaggtcggttttgagtcacgtgcttactgtgtgtcggaacacttgtgctttgaaggctgcgattggacacgtgattcccagcacgtttcctgaggttccgcctgcagcccgggcctgtggtggagtagagcttctctccccagctttcccgggagtgtgtggtctcctgtttcccatctgcatttgcttatggggcgccatgacaccaacacatggagccacttggagacttgtgtgttagttgtgcacagatacctacacttcccactgcccgacagtacgtgcagtgattttgatggctgtttatccggactaatcagacaaaaacatcttccaaaatacattataattgcactagggacttctaaatttttattcaatgggtaaatgtctttttatttcattttaaaaactcaatgcattgtttgtttatatttaacatggattcatttaatgagagttaagtttgaccatataatggaacaaatgttaatttcctcaaaaagtagttgttctatgtcagacccatgaccaagatctccttgctataattagatgacttgtttccagggtaaggggctcacctgcagataattttctcatctccaatagaggtgtgcattgccttctgtatctttacttcattgttctctagcttcctcatttgaaattgcaaatacttgtatctgttgttttcctaaggtgaacatgatgctttttactatcaatttatgtacttttagaaatatttaaaataatttatttttaaaggagaatgaactagtcaacctattaaatgattacgtcatgattttaatgattctcaggaaaaattgtgctgacccttagatgataattcttcaaaatgggattctgattctgtgttggccaagcagattataacccggcccttgcgtgctaaaccttaagtgtcaccatattcacccctaggcttcttcctctctcatggctcctccccagccaccctccgtctcccggacttcctccttgaacgtggaacctcaacggctggcctggccgccttgcctgcctggggcaccagccccccagtgctgtgtggctgataccaaagtcttcttttccctcctggtcaccagctcctgtactctctggctcagtgaatgaccccactgggccacgacaactaaagcctgactttgtgctggccccgccccacctcacccagcaccttgtcccgattttacctccagcgtgtttcttgcatctgcgttctccttgcctgccttccttctcctctcttgcccccaggcgcatccctgatcgttgctgccattctagaccagtctttcccacatttgagtggtgtggaaccttttttttttttttttttgagacagagtttcactcttgttgcccagtctggagtgcaatggcgcaatcttggctcactgcaacctctgcctcccgggttcaagcaattcttctgcctcagcctcccaagtagctgggattacaggcatgcaccaccatgctcggctaatttttgtatttttagtagagttggggcttcaccatttggtcaggctggtctcaaactcctgacctcatgatccacccgcctcggcctcccaaagtgctggaattacaggcatgagccaccacgccctgccagagccatttaaaagaacaaaaatctcatgaatccttcaacattgatttaactgttttgataataattatgcagttaggtacaagcagaaaactaagattcagctccttgtctttatagcttttaaatagatataaaagttatatttattaaacatttaaattaataccattaatttactgtgcatttaatgttaaggatgatgatgttttgctgaaacaaaatgacggccatccgtgccaggggttagggatgacggttgcagggcaggctcctttggtgtcagctgcctcgtgaccgtatcacgtggtgaccccagtctcttcctttcctgctttcatactgagaaatcgtttcgtgtacagcatgcggtgccttccccgggggttaacttgttctcagagtgagtgatttacatgttgcgtctccctcagcgctgtcccccttagcaccactcatgacctaggaagtcggagatgccaactcgggcagtggaatccagtggtggttttggatcactttttagatagtgattaaaatacactcaaaaatttaaaaattctcttggagaaattatggttccagagaaaatgacaggtttcccttgcatctcaaatttgctcagaccgtctggggatcttgttacatttggattgatccctccccctcttgggtacacccaaccactggtctaaagtgggccacactttgagctggaaagtgcttccgtcttttgccaacttaaaatttgtcctcgccaggggaatctttcctaatgcaaatcagataaccccttcctccctccaccctgcacacctatggcagggcccagacattcaggcacctccagggccaggcaggaagtggggctgagggcagcccgctgatttgagagaagggcccacggtgcccgtggaaacccgagagtgtggcctctgcacactgctgcccctcagggccatattcccatgtcagatggagagtatgggtgctgcggctgctggatcctaagatccataggagggcagggggactccatccaaccccagtgactcttggccagaagtcacaaacaccgcgtgcacgtgcagctggcctgcagcaggttcagtgtaaccagcgttcaatgcaaaaatgtatacctgtggccagtattttaacataagaagccatcacacacaagtccagtgtttctccttctctttgataatcaggaaatctggccacgtgggaccctccagccctgcagggtcgctgtgttgcacaaccccaggggcttgttggtggcagcatgttggcccagtcacgttctgggctaaagtactcctccctgccaagcaggtctgatctctagtttccagcagccctgggcaccccgttcctggaatttgctagtcgggttgagatttcttgtcctgttctcctttccttgaagacactcagggttgaggccttctcaggctgctcctggatttagcaaacagaaaccgcttcctctggagccatgtgcactctcagttaagggaaatatttgctcatctgctctcactccaagctcacattatatttcagtgggaatttgggagtgaagcggagcccctgtccgctcatgttccttgactgaatcagaatgtcttgggaattggggataccctctgtaaactgtggggtgcagcgggaagataaaatgcgagttgtcatgaagtctcacttctctccctgcaagggactcaggtgacagaggtgcctgccagagggatcctgagcagccgccccttggtggttgtgctttggaagggggagctgaagttcaagaccaaaagtgttgggctgggcagtggctgggacacccagaggttctgcgtggggagcaggtcaccgcccatcagtaggaacaggagactttggcagcccagcagcccagtgtcctggcaggagtgaagacggcaggagagctggccctgccacattccgttagctaacaagacacttcccctgtgtaactcagtcctggctttcagggagccatggcttccataacttcgctgcccctgacttgttcctttggggagcaggggacatgactgcacagccgggctgagcatggggtagtgctccagccactgaaagaaaagtgcacctgccccagcccagctagaccacagccatgacatggcaagcggggcagccaagtggctcttggtcgccacagcaattcttgggggggtcagataataaacccaactggggccaaggctggaaggcagaaatatgactcctaagaggccagggtattctgtagtcctgccacttacgcagcatttgaatagtgcctataatccaagattatcccccctggcaagacgtagagtttaagttaagtttacttatttaataagatcttaagtttattgagagttttcctaggatcaaaagaaaatcagcgtaggcctggcacagtggctcactccctgtcatccagcactttctaaagacctaagcgaggcatggtggctcactcccctgttaccccagcacttctgggaagccatggtgggaggattgcttgagcccaggagttcgagaccagcctgggcaagatgatgagaccctgtctctacaaaaaataaaataaaaaattagacagacatggtggcatgtgtgtgtagtcctagctactcggaggaggctggcgcaggagaattgcttgagctggaaagttcaaggttgcagtgagctgtaattgcatcagtacactgcactccaacctgggcaacagagcgagaccttatctctacaaaaaacagaaataaaaaaattagccgaacaggatggcacacgcctgtagtcccaagctactcaggaggaaggagggaggatcacttgagcccaagagttcaaggccacaaggagctatgatagcatcactgcactctggcctttttttttttttttttttaaagttttaattcagcctaatttagttcctcagaaagctataaaatgatgtcttcacatgcctcccgattagactgtttccccctttttccttaacaaataagtcctcgtagccttcactgggggcaggacaattttgaggatgtgatttcctcacgaaagtacctcccacacgccagccagaagagtggtgcaaatccatccgcgtggagccccgagggtgtgcgccgtggccagcatttgtctgagtgggaagggatgaagctttctgaatgaagcctggagcatctgtaatctcctggtgacaccagagaccgtggccctggcattgttgaaattccatctgaaatgaatgacggaaaaatgggagcccactggagaacttgagtgagggcgaggcgggtggatcacctgaggtcagcagttcaagaccagcctggctaacatggtgaaaccccatttctactaaaaatacaaaaaaaaaaaaaattagccaggcatggtggcatttgcctgtaatcccagctactctggaggctgaggcaggagaatcacttgaacctgggaggcggagcttgcagtgagctgagatcgcgccactgcactgcagcctgggcgacagagcgagactccgtctcaaaaaaaaaaaaaacaaaaaaagaacttgagtgaggctttgttatgctaagttttaaaatccacgggaatcccactgaagaggggtctctcatgagttgaagcaattgcttgtttattaccgcatcgctgatggtgactgcccttctctaattcctgccatgcaaggaagcccttattgtcttggtttgcaacttagtagcattttcctgtgggcttcattgggttgattggtctcagttccatatttggtgtatagcgatttagattccaagaaatcaaggtatgccacattttgccacgtttccgttaataagaacttgcaaagaaatcatcttctaaagtcgtttcaaactcaaatattttcccttaagcaacaatgtctaatggtgattgcagccccaagctggctcatactttattaagtttgtgaaacttggttacgatctagtaaataaaaaacagtattgtcacagtattggtaattaattggacttgaactcaattatatcccataataattattcattcttatgttgtaattcttgaaagatagcagaatttaggaggtcgatggaggctgggaaaagttctgaaggtgactcgtggggcatctcggctttctcaaagcgtcttcttgtatttcaaaactcataactttccttctgcctcagtccaggtgaattaactagcctgagtcttacgctctctcagtcatattaaggttacataagtttataaaagggtaggagaagaggaagtaaagagattgttccatttttcttggttaacatgggccagagttagatgagaagggaggaagacagagacagagactcccgatgtgaacgctgccattgaaagggactgagctggacaggcatggagcccaggctgagcaggagagaatcccagctcaaggtgtggggcctgcccaagctcagtgttggccgtcagcttccttaacaaagggaaacctgtcaaggtagagcaaggtttgctgggaattggtgttaaaacaagaagaaattctcaaccaccatttaagaagactggattaaacatgacttcaaaaatgtgttggtttcaaattctgagtggttttcaaggaggcttaatatgatttcattaaaaatgaattagagtaaattacatgggattcatctattaaatactgttactgaaatttgccagtggaattttggttttaataaaaaatctgaaatgaaggaaactgtaaaaaaattctgctttacaaatataaggtgagaatacagttaatgcagtttgggtttttctggggtttttttgtggtttttgttttgttttgttttggtgggtttttttgtgtttggttgtttttgtttttgttctttttggctacaaggtgtgttttattttcattattcatagaaataattttctataatgtcctggggcaaaccagagaatttggcaatctgattgggggtggtccttcagagacccacaggccagtggcatcggtgcagagtgcccaggttcacaatgcagcttgtggctcgtgtccatcttgcaggtcgctcttcctccacatcacaactggggtcttaaggatgacgagggcaggaaatcctccgggctcttaggaaatttcactccgcttctgcccagtggtctctttggtcggcagggtgttcttctcctgcgtctccgttttcttcagcttggccctattgaagctggcgattccccccacgtctggtttgtctgccattttcttaaaacaatcggtaccatccgtggcgggctcttagctcactgcaacactctgcctcctgggttcaagcaattcccctgctcagcctccccgagtagctgggattataggtgcccaccactgcgtccagctaatttttgtatttttagtagagacagggtttcaccaatattggccatggttggccaggctggcctcaaactcctgacctcaggtgatctgcccacctcggcctcccaaagttctgggattacaggcgtgagccaccgtgcccggcctggttaatgcagtttttttagtttgttctttctttttctctttgtctctcctctctctttctttcactcgctttgtcacccaggctggagtacggtggtacaatcatagctcactgccacctcaacctcctgggctcaagagatcctcccacctcaaccccccacgtaactgggattacagaagcacaccaccgtgcccagctaattttatttatttatttatttttttagagatgggggtgtcagcatcttacccaggctggtctcgaactcttgggctcaaacgatccttacaccgtgcccagcctggggtttctttctttaaaacattatacctttaggtgtttcctgtgtgtttagcagttaattatccaaaagatctagtgtagcacgtctcaatgtgtttgtgtcgtatttgttgaactaatggcatatcttttagcattcgccagtatcacagagtgaagttctgcacacacacagaacttgaatgtatatgttgcctgtgtacctgccttttcttttttttatttacattagaatttctatttggctctttttcccttgtagggcatgctgttgaagcgaagtggcaaatcgttgaataaagagtggaaaaagaaatatgtcaccctgtgtgacaatggcgtgctgacctatcatcccagtttacatgtgagtatagccccctcggagcaattaacagctgcagacctcaactaaacactgtggggaaggggaacctaccagcagcccagcctcttgtctctgtttgaagtgaaagtcgtatttggtctcctgctcaactgtgagataaataaccctgttcctcacactccactagaccatatgtctttctctctcttcccctccctaccagtcaatctgtggctttccaattctacaaagaattacaataaaaggcacagatgaagtaaaattttagatgagagtaaaaagacaggggcaaggagaaaagagaaaggagagaagagtggtctatctgaaaatcgagaatgaaggaaacaattacatttgaacccaggatttagctttgaaaagctgtgaacaataatcagaagtcaaatgcaattcatgactcagcttttattgtcagataacacattccagtgcattaggcaaaagaaactctcctctttgtgttatatgtaagtttatgttacatataagtttgttatatccgtggtgtataagatagatgtataaacaaaattaactttattcttggggaagaaatgcagacgttctacccattgataaaatataaaaaaatgcagacattctacccttgataaaatttaaagttggggtgttctagtttcatagcaaaccattccataactcttacttgatgcagagaaatgtgtagattagaatatatggtggaagtcagtcatttgattccattgtccctcagtatctatgggggatggattctgggatctgccttgtataccaaaatccatggtggtcgagtcccttatattaaatggcatagtatctgcatataacctgagagtatcatcctctatacttttaagtcatctctagattacttataatatgtaatagaatgtaaattctctgtaaatagttgctatactattgttttttatttgtataatttttcactgttgtattaggttatttttcactgtttttttttttttttttgagaggagtctcactctgtctcccaggctggagtgcagtggcgcgatcctggctcactgcaacctctgcctcctgggttcaggcaattctcctgccttggcctcccaaatagctggaattacaggtgcctgccaccatgcccagctaaatttttttgtgtttttagtagagacgtggtttcaccatgttggccaggctggtcttgaactcctgacctcaagaaatccgcctgcctcggcctcccaaaatgctgggattacaggtttgagccaccgcgcctggccttcttttgaatatttttaatccatagttgattgaatctgcacattcagaatccacagataacaaaaggcaactttatatcactgtgtcaggctagtagtaatagtcacagcagcagcagcagcagcagcagtattttttggtagagactgggtctccctctgttgcccaggctagttttgaattcctggcctcaagcaatctgcctaacctcgccttcccaatgtgctaggattacagtcatgagccatgacacccagccaagctattaatttttaaaattttgaaatgctttgtaaaatggcacagttattgatgagaagttagaaatagcatattgaagaaaattaatatcattcctaaaataccacctagggaacctgacttcacattttagggtgcatactcccggctatttctatgtatatttctcttttccttccacaagcacatggtcactgtgtatacactgcccacagcctgccttcctcactcatagtagatattttcatgtcaagaaatatacttgtacaccaccatttttaatgattatataatattccactgtgtggatgtgccttcattgatcccacggtatctgaaaaatgaaccttggcagataaatttactttcagttttttcactgtcataaagaactctaatcaacgttcctctgtttatctctctgtccccttgtccaatttgcctaggatacattcctagcaattggcttcctgcgttgaagagtcgcatgtgctttcatggtttttgctgtattttgtcaaattcccagaaaggttgtatcagtttatctcatctggcagtgtataagagagccttttctctgccctctcaagaacatttaccttcagaaagaagagcttttcctaatatgataggtagcacatgggaaccttgatgctgagttcgcttgctggcgtcttgagttgcccttgtctccttgtcttttagcgtagctatacctttcagaaccacgcagcaaagcaggtcttccgtcggcatctctcactggtttctgttgttactgaaagcacctcccatgcgttactattcagtgggattcgagatgcagatatggatagattcttacatagatattctttattgcagtaaggaaattcctttgtgctcagtgtcctgctagtttagttttggaatatagtcagactggttctccagggggccttcagatcgaagagatgtaatacccattccatgacgcccacctgggaccaggttggcatctctccaggactgccccatgtaggtctccagttctgcagccctctccacacccagcttccatccatcagaacaacagcgaggcaccaggtcttccctggattctctctgcaaagttgctccatcagcagtggccgggctgccctgttactggcttagctcctcctatggaccctgtcagagagcagaggtctaactattgaaccagtcgctttatgtaagttagagaagtgcaatcaaaatatcattcttggtaagactcactgaccagtaaaaagtgagagctgatggatgatacatttccagtcaacatatgctcactgctgagctcaggctcagtcgaagggatgtttgctgcttcttgccaaggggcagatatggtaacaacgatatgtatcagaagattcccttaggaggcctaaagcctgtttgcttttcatccaatcccttgagtatataatcacaaccagttcttcaaaaattctcctatccacaggcttttttttgtgatgtccctcagtgtttgccaattccatcctttctccttcattcataagtatgcatgaatcttactggagtacggaagaggggcgcaatggggctttgttgtataattgtatagcaagcaagagccaatgtcattttcaaatgcaatccttttaatgccagtctccttggaactgaaatttttgatgcaggtacgtagttccctatggaaggggcttaatccaggaatggatttgaatcactagagcctgaagagatggcatgaccttccacgtaatccttcatgggtttcattttcacagccaagcattggataaaagtgtggagaggcagtgacttccaggtgtattctctgacaggtgcatacgagtccgttctgttgtgacttgttaggggaagtgctgacccacaccagctgagttagtctggtggtcttggttcaaaatgggaagaggcattcaatgggacacccacgagccgaatccagattttccttcataagaaacttgagaatgtgcaaatgtgttgctagttcaggtcccaaaattttacaccgtgagagtgacccagttatctcagtctggaaaatttcaaaagatcgtagaaccagatgatctcagttaaacacggaccatgctgtgacacccacatccttggctatctccaggatgtattacggcagaaggaccactgagagtcattggccacatgcagtggtggcataagtggtcaagtgttgggaaagctgccaggattgctggtgtttgggtttcagagtcattattgttgctcctaactctattactgaccacagcgtgaagtggggcctctccctggtaacaccctattgtctgaacatgggaacctgcctccttttctctcctctgggattcaggcccatgtccagcctctgtagacctatatcaagtcattaaaagtagatgttaacctgtcagtggaccagaataactccctgttttacactagaggaaaatgttatctggtttctgagaacactattctcatccaccttttctctcaaaggcagatggggcccaggttccaacacaagagcccccggagcaggggcctgcattgatctcatatagcatagcctacagcccgttcttttccacagagcccaggaaaaaaaatcccggccaaaccatcagatatttttagttttctacaaagatgtaaacgggtatcaatagtgaggttgctgcaccgattcctggtgtataccactaatttaagaagcccaggtaattagtggactaaaaaggaaactagcatgcttttggggagacgggattctaatcagctaatacttctattatggggtgctgacttgagagcgccaggcttgcagttgtattaaacgtggaagattcagacagagatgagatagggccgtgcggcagcccatcaccggcagcgcttgctcgtggtggtgaggcctctcccttccggcacagacatttatcttctgtccacgtgtgtgccgctcacagtccacgtaaggctgcgccctggtgccaccaccagcctccttccatttgcttatcatgttaaattcagggagctggggagagggtcttgcacacaaggaacattggagcaagagtaaacaactgagtcaagtttaaacggaataggccaatgtggttatgggcagggggcgggggagcgggtagttcaggaggatctcaggattatttgttctttaggatcaaaccgagaaggtggaatcgagggtctttaccacccttgtctttctccctctgtgacacagggatgttcaggcatagtagctgatgtcagaggattgcctgtgtgggataggagggtctagaaggctcgactcccctcctagggctgctccacacagctcctgcattagtcaaccaaattaaattcccaggcgagctccccaaccagtcctccctagacaagacaggcaagcaagggccgagttgatagacctgcctgggcaacatggagagaccccatctctacaacaaataaaaaagtgagccaggtgtggtggagcacacctgtagtcccagctactcaggaggctgaggcaggaggatcacttgagccaggaggtcagggcttcacagtgagctatgatcgtgccactgcactccagcttgggcgaccatgcaagaccctgtctttaaaaaaaaaaaaaaagttgatagaggcaggtacagcatttgttgctgtcgggtagagcggccacccactgccccagccttccctgtggccacttcagctcctgcgtgctcccagcagtgccagcatcctcatacctttgtttgggaaagacaccccagcagtggggagctctggctttcagttcctttgcacactgtggaagcaggagactgaccatttcctaaccttgccaaaaactctgggtgagggtttttcaatgtcttcattagatgcccttaggaaaagatctccctgaagaggtcatttctgttcctgaggtatctgaacacagtttgcttattgcacaagtgtccacggaagtgtttgtgtgaaagatcgatcacctttggacacgaacttcaagtatcagtcccagacagatgttttccacacatcggtgtgttcgaaaataaacccagctcttggccaaacaaacagtcggtatgtggccgtgctgtgcaccgagctcgtggaatcccagcaggatgacctgctctttgaaactgtggcttcagaacaaagcagccagtcatgaaactggggaaacctgacattgcaggacaccgtggggctggtgtgaggctgaaaatgtacctagaatgggtcggctgcctgggaacctcacgaatactgatccccagggactgcgtgtctccctcagaactggggcagctttctacttgcagaagatcatgacaagggacttcagctgggtggtggccctgggatgtcactttccttcccacttaattgctttggatttctctttcctttctcgtcatcccccaaaagtgtctttgccttttttttttttttttagccctgagccccaagctcagtccttacatagattgtttaggagaccagtaatccctagttcctttgacttgcagctcagcctcactctgtcctttacttaggacataagctaaatctacatacccttcctacaccacagatagaagatatggagggaaacctttttctccaggtctgtttcatgttgttgaaaacctcaaacctttttcttaggagagaacctctgtttctaagcagtggaatagaattgcttatggaatagccaggtcataggatgtgataatttccctggaaatcagaggggaaaagaagcaaaacatggagccaactcagactaagaaagctccatgaaagtttatgccagtgataacctccaggccccagatctgctcagcttgggttctgtgaagtcttgaccccagccatcacccacagccacatctcccagcctccttcagctcttccccaaaggcttaggaggtgttagcactggctgcctcaggatgatggggtccctgcacttccatgctgtgtaggttgagagaaggaggtatgggcacaggaggaagtgatggtagatttccactgtagttattcccttttttttttttttttttaagacagtcttactctgtcccccaggctagagtgcagtggcacgatctcagctcactgcaacctctgggttcaagtgattctcctgcctcagcctcctaagtagctgggattacaggcatgcaccaccacgcctggctaattttttgttttagtagagatgggatttcaccatgttgcccaagctggtctcaaactcctgacctcaagtgatccacccgcctcagcctcccaaagtgctgggattataggcatgagccactctgcccagctgtggttattcctaaaggccagtggtggggcaggataacaaggacagcaccagagtggggaggggtgaatgaacctacagcgtccacatcattgcttccctcacagagtatgttcagccaccagttgacagtgggcgggggctgcccagcctgtccaggagctggagcacacctgcatagctttcagatcacacagaggtgccctgctgcagacgctcaggctacatccgttctagtgggtgtgtttgaaggtagacattgggaaactggctggaaggtgtccgttttagaaacatggagaacgaattctttcactgggtaggaagtttgatgacattgtcttctaggtcacttcagactctgaagaatgtgagctctaaaactttcaccaaaaactctcagcaaactcaagctaatggagttagttggatttctaaggaaaacgctgtcctgaagttgaagctactgggtgtaagactaaaactgaggctcaaaaaaaaaaacacctcagttaattcatctttctttctcaagatgctattattaaatgaaaccaaaacccagttgagataacagatagaaaactcaaccaaataatgaatgaaactgccttaatggagtggccaactgccctggttttctgcaggactgaggggttcccagggtgcaggactttcatagctaacatcagggaagtcccaggcaatctgggacctggccgcacttgctgcagtactgaccgccctaacagctcctttatctccacttcgcattttgcaatgataaccctaaacatttaaataagactgacacggtcaaagcaagcacgctggctgatgctgctgctctgcggtctacatttttgtgtctttgaaaaattgtatgtctccaagacctttaaaaagccctaactgcttaactttcttgggggaaatatatatgagtgtctcatggttttcagacactttgctggatcacagttcaggtggatcgagggcagcctgttctaagaccctgagagtccctttctgtggacttaaatgtgagccttagggagcaccttgatagaaaaatggaggcataatgagaaagaacttggacctcagggcttcacagttcagcgtggccacctattcatcttccatgtcgcaagcacggccgtcgagtgcaaggctgcaattccctgctgacaaagatgtgtgcagtgagattcctaagtggacctggaaggatgagctgagtggcctcacggtcaagccaaggacttcaaggtgcccctgtctaggaaagctcaccagtgttccggtcctggctctctgggcttcctcaggaggtcgtttggcagctgtgaaactcctcccctccgggccatacctggcagacgtgcatgaactggtcagacttttaaaaaacctccttctggccaggtgtggtggctcacacctgtaatcccagcactttgggaggctgaggtggatggatcacctgaggtcaggagttcaagactagcctggccaatatggtgaaaccccatctctactaaaaatataaaaactaaccaggtgtgctggtgggtgcctgtaatcccagctacttgggaggctgaggcaggagaattgcttgaacccaggagacggaggttgcagtgagccgacgtggtgccactgcactccagcctcggcaacagtgagactcccatctcaaaaaaaaaaaaaagtccttcttagattcctttccattctgcatgtgcccacattaaaacagctgtggctctgtcatttctccctgacctgcaatactggaattttccttcttaaattttcctcctttaaaattgttaaagagcttttcttcttttcattactaggcaggttaatttctatctgagtggcttggactctcctgcaacacataaaccctttgattctgtgtgtcgtcaaagtttggttttgttctttcaaagccagggcagccaaacttggactctctaaaattatcatcagaatgcagatttcagaaagtttctagtttcaaaatcagacagaagacccacttctttactgatgtaaagacaacaaaaagatctgtgatgattcctaagtaggtattttcctcaaaagaaatcattcaagaaaaaaaaaaaaaagattgctatgagaatagcagctcgtggctgtgctcagtgcctgtaactgcctttgtaaatacacgaattcctcacataggactgcaacattttacttgaggattgaagattcacgaagaatctgtgatccatctcttcacccaccttcactgtctgctaggatggacctcagacttcttgaggtcgtgaacattcatttacactcagagaaacttttcactggtttccccagaacattgaaacagtcagaataactcctgtgcaggctactggactgacaaatgtgaaggccagattttcagatgtgaagctgggaagaccaaaaagacagacctccctttcttactgagaagagcgtagtcagacatgtcaagtctggcacgctgctgcagaaggcgtgattcatcttaagatcaaaaattatttcatcttgctttcttggtcataagctaaggtgcttggagctgtcctttggcctttcatgtgctgtgtctgtggtgcgggtgtgctgtgtcctcataagggtgcgccatgtctgtggcgtagtgtgcaccgtgtccatcataagggagcgctgtgtctttggcgcgggtgtggcgtgggtgtgccatgtccatcataatgaagcaccatgtctgtagcgcgggtgtgccatgtccatcataaggaagcgccgtgtctgtagcgtgggtgtagcgtgtctgtggcgcaggtgtgccgtgtctgtggcatgggtgtggcttgtctgtggtgtgggtgtgccgtgtccatcataggggtgtgctgtgtctgtggcgtgggtgtagcgtgtctttggtgtgggtgtgccgtgtccatcataaggaagagctgtgtctgtggtgcgggtgcaccatgtccatcataagggtgagccatgtttgtggcgtgggtgtggcatgtccacgagggtgcaccatgtctgtggtgcgggtgtgccgtgtccatcatgagggtgcgccgtgtccgtcatgcagatgtgccttcatggccctccctgattcccaggccccatctagtgtacatcattgcctcgggtgagaatgtccctttctgccccatctagtgtatgtcattgaggaggagggctgtgttccccacagtctgcccaggggctgtcatgtgagtggcacataggtattgcttagtacacaccggtcacagtgacttgagtgccaccacaatgaagtttccaatcgtgtgactccttcagcatctttgctcctgaacttcctggactccagccctcaacattgacaatcctggctgtgctctacagattgtggtatgattgagactaacagtactcaccatgtcttacaacatgacctccctaaactgacatagggttgggtgaacacacacacacacacgtaatcactgcctcacgtggcattattacaaatgctgcaaaatctaaacacatcactggaatccaaaaagcaatccatttagaggcatatgaggagattgtacggatattaaagaacaaagatctggaactatggcaacaaaccaacgttgctgttctagcctgagctgcctgttttaggcaaatgggaatgcttttggaaacaatatgaaccgcaacgggtatttctgcaagtttctaagactggcaggagtcagctcgggggaagcaggaagaatccccagttggttggctattcttgggaccgaagagataatccccattgaacagagcctacactcacatccttgagtccgtgatgttcttcgcttccctgggaacagccagagtccagctttccgtgtggattgctttcacagggatatctggcccttcaagccagtggtgtgaatgtcaccccaagaaccttgacgtgtagatactgcctacttcaagtcatactgcagctctgcctcttcccaagataggatttgaagcagcttccaacagaaaatggatgtgaaaatgtattgtgaacacatgcataggaccatacatacatcatacacacacacatacacacacacttaaacatacacatgcacatgtacacacacacacacagctatgggcacaacttcatttcaacttgtagattgtgaagtaaaggcattggaactttgtggcttgcaaatctaaattacctccttccatcttaagatctcttccctcctttattctaaagtgtgattcggctcctctcttagctgatccttctggtgtgcaggtcaaagaacactgagctgggaatcagttgtggtttccgattctgccgttgccccacccgcttccatgttggttccaacgtggctttgtggagtcctgggactcaggcacagtgtgagaatcactgagcctctcaaggtcaattatgcagtgattgcttggtagctcttcttcctccacccacagcctcggcctcggcctccgttttctcttcctcctgggaattcatccagaatgacgccagaagtcacacagaggtgatcttgcagaccatactcccctgagtgtgcaggcctgcatttttgctcagttcagctagcgcagtggcctgctcataaagttttccaaaacctgtaggctgtatgaagaatagcggttactcctaagctgcttttaactttcaccttgtgattctcatcatatttttgttgatttccctcctttgagttcttttatgtatttccatgatggagaagatcccctctcccgcttggttgatgtccgtgcccctgctcttgccccagcttgcctcctcagactggcctctcacctgcttcctgctctatcgctgtctttgttttcttttagtttctcatacttgccatgttatctggcctccgggtcttcacaaatgcagttgcctctgttgagaatgttcttttctgccccatctctttgcctcactaactcctctttccaatcctggcttaaatgctacttcctcttgggagtttccccacactcggcctatttgggcacccatgctgtgtgtgctctcacgttactctattgggccatctctctgattctcccacaagactggaagctccttgaggcaaggatgtatatgtcaccaatgtatctctaacatctggaacactggcttgttggatggatggatggatggatggatggatggatggatggatggatggatgaatggaggcacaattagcccatatgcttaacctttccttaaatgtgtcggactagagttcctaaaacctcgtggaaggaatccaccatgcaacacttttaggaagcagaaatatgtctcagccatattctggctccatttgctgcaacttaaagaaggatcttgatgggagaaaagcttcaggattttgtttgttgcttttttcattttaattgtaaaatacatacaacatttgccaccttaatcattttaagtatactgttcagtagtatcatatacgttcacgttgttgggcagtcaacctccagaactttttcatcttacaaaacaaactctacgcataaacacaaattcctatcccccctccactcagcccctggcaaccagcattccagtttctgtctctatgaatttgtctgctctaggaacctcatataaatgaagtcatatgctgtttgtctttttatgactggcttgttgcatttaacattatgtcctcaagattcttccagttgtagtgtgtgtcagaatttccttcctgtttgaggctgagtaatattccgtcatatgtacacaccacattttgtttgtccatggatggacacttgctttcacctcttggccactgtggacaatgctgctaggaatgtgagcatacagataactcttcagagcttgggttttaaatgtaaaaactgtaacatgggaaagctacagagtatggctgaatattaaacctgcctaaccttaccagcactctggtcatggtacatttgctgggcccagtcctgaccacagtgaactgtgcaggcttcataacatgcatggtggtctggaagccatgtgataagaagaagaaaaccacccagcaatgacatggtcacatgggctctcctggagtttgctaagcacctgggtgacctgggaaagaactttgtcattcatgtgacctgtttgaaagaatgtgatcagttgtttctcccatgtgtcaacagttccaaagccaaggaattaggccgccataaaagtagaaatgttttcagggcatagtgacaacttttgttggaaatggagcctactaaaaactcactggtgttacaccaacacagaaaaggactctgtatcaaagtctatttctgtctatgtaattctttctttgttttatataccctcagggtttggaaatgtttgggatttaaaaataaaagggccgaaagctatcctcacgacatttcattattgatgttgttgacacacagtgaatggaagcagggtgagactggacaaaataaagtcctcttatttctttttttgtttgttttttgttttatttggttttatttgtttttttggagacaaagtcttgctctgttgcccaggctggagtgctgtggcgtgatctcagctcgctgcaacctctgtctccagggttcaagcaattccaccatgcccggctaatttttatattgttggtagggacagggttttgctatgttggccaggctggtctcaaattcctgacctcaactgatccgcccacctcggcctcccaacctgctgggattacaggcgtgaaccaccacgcctgaccaagtcctcatgtttctaaaaattataccactaaatagtgtagatcctacctaacctattttcaacattgaaaaattctgccttcttgcatttctagttaaaatgaaaaaatagaatatatgtgtgtttctataaatagcagatttaacagtgtggctggagggtttgagtctctaagcttccagtggaatccaagggacatcgtcctaccagtatgccgcgtgatatgtcagatcgtctctggccgtcctttgtacccaattgataacattttgttttccatttttggccttttcgtgttactcattgaggccaaaaattcttacacaaggtaaataaatcaaatccctctggtttcctcagcaacagtaagtcacagccgaggactcagtaggagaggatgactgtggggggtcatgaggaatgttcttttacttctactaagaaattgaatttcattattatattttataaatattttcttctttggcttataacctgattgcgggcttgttgctgaggtcttggaaggtaggtagggaggggcagggctggagaggcctgtttcttctcaggtgtgcctgtggccccagatggaaaccaatcaaggtgcgatttatgttcattaagtgcttgtcaaaactgaaaaattttctaatcaacagcaatctagctgcagccccctcgatggctgggagggccacctctgccgcatcggctatttgcctgttacaactctaggctaaaaatccgctgatgattacattaggctaagctgcgaagtaaatgaaccatgtcttatttaggtgccactagcttcagagtagtcctgccccgcagggcacttgatagcattttatggctttaaaattagtgtagcttcccatttgctgcagggtgctacatgttctgcctttgaactcaataagcaaagggaacggggccttttgtttttcccccttctttttttccccttgcattttagcaattttgttttgcatcttttccagacggcattttgcaataaaaatgtctgactaccatatacatgcctcccccatttaaaaaaaaaaaaggtgggggaagagaaggaggaaaaagcagaaaatgtcatgcgtttgcagaggacaggttcccccccccacccccacccccgcctgtgctacaaagtgaaaaatggctttgcaggtcaaccctaatgacttatcatgtcagaattgctacctcaagtgggaacaacacctttagcccaagaaattgccacataaagtcaaagggaaaatagttcagtatttttattggacaagagtggtgagagctaacatttatggagggctttggcgctctgttaagcacttgagtattatctcagtgaaccctcgcaacagtatcatgaagctagaactgtttttaaagatgtggacatggggaccctgagtgactgaatgacaggcccccagtgtgcaactcggaggagagtggaggcactctgatttcgaggcttattccctgaccaagagaaagtcaacttttgtcttccaaagacttctttaggaaatcagaaaagtgtggttatcagtgaattatctgattcatttgaatggaatctaatacaaggtgctgtgaactcccttggcaggcattatgtttaggaaaacaagagtagttcctgtaaaagcaatgcatgggaaaaatacgtatagaagacttctaaataggcctaggtggaaagtttaaaaattagaagtactgaccctttgtcaaggggaaaaactgaagtgggagtttgtccgtgttaccttaggtctcatggcagaagacatgatgtagcaatcgatattcacctcagaggacagatgtatatgctctgctgtcttaaaactctactgtttggccgggcgcggtggctcgcacctgtaattccagcactttgggaggctgaggcaggcggatcacttgagatcaggcgttcaaggccagcctggccaacatggtgaaatgccgtttctactaaaaatacaaaaattagccaggcatggttgcaggcgcctgtaatcccagctacttgggaggctgaggcaggagaattgcttgaacccaggaggcggaggttgcagtgaaccaagatcatgccactgcactccagcctgggcaacaagagcgaaactgtgtcttaaaaatatatatatactgtttgttttagcgctgcacattttagcaaattcgtccaaagaaatctgaagttttaaagagacccagacaggcagtatcaccatggtgaacatttccttataagtcaaaatttctaggatctaactattgatccagttgtttcaagccatattcaaatattaaaatactaggacagcaaaggaattgtgttggctccttgaagttcattgtaatgagaggcctacagtgactgtgtagagacaagcagctgttttcatatccgaggcatgcatcgtacaggctaggtttgagcaggcatgggttacaactgcgtaatactcaatttaacctagaatgagaaaaatctttcaggcagtgtaaacctcaatacagtaggtcagtcaagacagatacagtcaagaagcaaaaggtgtattcataattcgatttagaattttctgctttttgatttgtagtagaataacttaaccctttggactggtggacttgagcccacgcatgttggacactggcctccgcagcacatgaagcagagaagtctgcttttgccatcatgtagggactctccactgtacatgaagctgccaccactggtccccaacaaggcctcaccagccttctcgtttaccacgtgtagcataatgacccagacccaataaagcatttactaagtcaagaatattccacacatactcttccttacctccatgatggagtagtagactgatttcatcttgatagtctgggtcagtcactccagccaacactgtaacttccttcttagcctgttgactttgaggtaggaggagcccaaagtggccaggtgacaatcttacagtttaatggaattgttgttgtgtctcggtggcagcatttctccctctggaactaagacccctaggccagcagaacgtaatgttgtgggaacaggaagcaaaaattttgctagtgggtcactaggggtgatggtgagtggtgccacttccatttctgccccttgattcctggacctgtgaatcctggcaatgggaaaaacaataccatatattggacactgattcagagcatacacagccttctggagaactttgcctcagccctgcaaagtattgtcacctagttggcattgtaattgtgacttcaaaaggccattccaccattctattaatccagctgcttcaggatgatggggaacatggtaagaccagtgaattccataagcatgagctgtttgcctctgtgcatgctacacatctgattggccaggtgccttcctcctgccatggctgctggtcactgtcatgcacttacaagcatgggtcaggtagtcttcaggaacgcagttctgaaagtgaaacactggaatgcttttggctgtcttgggaaacaaagttatttctcatgggatttttccctttgaagctgcctcctaccttgctattgtgactatgatcctttggggagaagagtaattgtcttcttgagttctgtgatctgaagggatgtggccagaagatttttcatagttttacaatattttcacagtatttttaggagcatgactttggtctgcacctgtgactacgtacaaggccattgtttattattcataaatgtgggatgtgaacgtttgcttgatctttttgaatgggtggtcctatatatgtctttatgattagtttcctttgaatataatattaaatggagtttgggaatagtagtgaactttacaatggcttctcttacatacttttttttttttgagcccagaagtgaggctttttaaaaatagaacttcacaaattactgcttccttttgatactggatattcatgaagtgcagtgaaaatagggaataatgagtcattcttttcctccaggagaaggaggaacaaacaaatgtgaaaacatttacaatatctttccacagtccaaccctttgctcctccccggttgtgtacataaaagcatacacatggagccaatggctgctttgcagacatgaagctagactagtggttctcaagactttgggctcaggacccctttatctttttaaaaattatgggccaggtgtggtggctcacacctgtaatcccagcactttgggaggccaaggcgggtgggtcacctgaagtcagaagttggagactagtctggccaacatggtgaaaccccatctctactaaaactacagaaattaggtgagcataggaacgtgcctgtaatcccagctactcaggaggctgaggcagtagaatcacttgaacccaggagacagaaattgcagtgagccgagatcacaccactgtactccagcctgggcgacagagtgagactccgtctcggaaaaaaaaaaaaaaattatggagggaccccaaagagcttttgttcatatggattttgtctattgatattcatcatgttagaaattcaaacaaagaaaatatgtaatccatttaaaataacaataaaccacccattacatgttagtataaataatatttttgtgaaaagtataattttcaaaataaaaaatcatgagaagggttgcattgttttatatttttttaggtctctttgatacccagtttggtgtaagacagctggattctcgtatctgcttcagtctgttgtgataggttgttttggttagtctttgagtatctcacgttacacagatgtgtggttggaagagggaggaatatttcaaccctcatttcagataattgtggatattcctcttgcacacttcaccaaaactcaacatgtgatagtttcttaaagcttagtaatgcaatgtgaaatcactattttttttcctcctctactaccttaaaatccatccaactgacttgccctttgaatgatcttttacgtgtgttttatccatgcaggcatatccacatgcatccatgcatgtgatgtcataccccggtcatttcaagaaaaactatttttgaaatgaagtatgcagatttctaaatagtgatagttttcatcatataacatcaaaaattttcatttgtatcaccgccaatcttgtcagaaaagttgctaagtctttggaaggtgtcaagctcatagttagagatacaagtttgccacatacatagaactgaaaaccagagtcagtcaatgtctggcacagtcattctttcaggtaaaaatcttgtcccaccaaaaaagtggctggttcagcttgcaactccaacagctgcagaagtgcgtttctgcaagacaaccatcaccctccggtagccagcaaaaatgctttatgcatgctttttccatgtcatacctgagaaaatgaagacatggactcaaaggtcgaaatgtttaaaaatcggtagcacttctttttttaagtgtattcagagcatctgtgagacttttttgtttgtacttaaagagcatgccagtgaataatgtgatgatgactagtacagtttggggctactactttgattcatgttaatcaccagcatgtttgcaccatcaaaacaaatttcaacacagcaataaaaaggcaagtactgtatctgaattgttttgaaaatcttattgatttgtctgaaaagtgatctatcttttcagtattatatattaatataaaatattatatttctcaacatacatgtacagttataaactagaacttaatggagaaaacgaattggaacagattgccactattttccattatttttttccatcatttaactatgtaaatttaaagtcttaatacttttttgaagtatacgtaaaaatggagtatgctgattacattttctatccttgaagaaagttgagcttaagcactgtcagattttcaaagccatatggttatttctgatctaatgttgagatgccaatcatatagtgtatgcatttcagtttagctttaagatcttgttaactgcttttagtacccctgtgaacacatcagcaaaccatcttttcaccagacagccaaaggtaacctccggatgtgaggcagtgagaatcaatatagtaagggtatttttagggactgttgatggattgctgtattttgagcttaacttcaagtgccaaaggccccagagctgactaagatgaactcaccatttactgaggacgggagaggccatcaggcacatagtgggatctgggattgccaagacaagatgtacacacctttccctttgtagttttggggagaattcttgtatattttttagtagcctaatacggtattttgatgaggactttgtaccaccctccttgctggagccaagtgttactcatttggtaacctcccggtcctgggaacacataactgtgaaattctaggacaacgtgatacagcagcgaatcaattaattctctgtatcaggagggatctggtacaccgagatactaatgactccgcgtccttctccaaaggcagccccacagaaggcgggcgccacgttaagctgtgctgctgtcagcaagctgaaagctatgggtctctgacacggctctcaattgctagcaggtttctctcattgcacctcatttgcatctgggacatcaattagcatgtttgttgaggctaattgaatgaaactcaatcatagctcttaattgcttgactatgtgaaaagaaatcacattaatgcagctaattaagtgtacggcaatagatgcaacataattaggagcgaaatgtaaaaaacaagggatggcaaaggtgccggagcagggttgcagggggacagcgaggcacagttaccgagcaattggcgggttcggaaacaggtccctttgctctggcgcctgcttggaaaaaataagccgcatgatgatcatggacaacttgagaaggaaaatgcaaataggtttgcaattactactttttcaagctgttgaggggcaggagatggcacctctggggggcctggctcttgagtgggccccagggacttgttaagtgctgtttaaaagtacttggctttgaattaccctcacgccttgttaaagggtttttcctcttttatcttcgatcagcattttcaacaaggaacatggagaagggtagtatctgtaacatttgcatatcaaaatcaagcttcctgtcttaattttaccgaggtccctaactcagacccgtgaagggtctgcacagccccttgacttctacggaggacattgtttagtggttgtagctttaattcctcaagtaccaagctggggagagatgaaaaggatcagttctttcaaaaccagaaagctcagtgtcgtttctcttgggaggaacttgaagccacagatacatgtgtctttatctcccacctgtgtgtgaagcgctgagtcggagggcttttattgagtaggaaatgcattttgtaaaatttttaaaaatgtgcagtgccttgaaatataagaattggctattttaaataccgattttatttattttttttttttagagctagttcttctgaggttgtaacgcctaactcaggcaagaaaacagatcccttagcccatgctgagctaaagataaatgggttcccttgccgctttcgaatctggagagcagacacttggtacatttctataataattttaaataaaatatcgtggttattgtatgttaaaacatgcctattaaaagagcccatgctgaggcttagtcactatctgattagcctcattttagagcccataagcaataaatgctcaattacactcctgttattgtattttaatttgttaagaattggcattaaggaagaaagttatagcaagttgatatttttaaaggagtaactgtgcaagaaggaattcattatttacaagcattaactttggtttggaaagttgggtttgcatattttcagtggatattaatggaagtaaactaaagatgcttgagaaaaaccttttttaggaagtgaccaacactcaccactctacggtgtgcttttcctttcttttctcttttcttttctttttgagacagagtttccctcttgtcgcttaggctggagtgcaatggcatgatctctgctccctgcaatctctgtctcccaggttcaagcgattctcctgccttagcctcccaagtagctgggattacaagcacacgccaccacacctggctaattttgtatttttagtagagcaggcatttcaccgtgttggctaggctggtcttgaactcctgacctcaagtgatccactctcctcggcctcccagagtgctgggattacaggcgtgagccaccgcgccccgcctgatgtgcttttcatttgtcaccctcaacacagcgcagtcctgagaattcctgtgccgcttccagctctagctttccttccatctagtttaacagagttaattcaatagtaactttctttctgtctttggtctacatcctctcaaagttgattatgttttgtggagtccagcatctcaacttccaagtggaatccctttcgggggctggtgaagtcagatttgttgttcccagcccagataccaccctcccgttacccgaacccaccatgacagctttcctccaagggggctgtggctgactccagccagcctgccctgagagtcaggccatcctccctgagccaccctgtaaaatgaaatggccagtcaccagcctcgggtggccgggcacctctgctcccggcctctgggctgatgtgagatgcacgcgtgccagggttttctgcctggatagcctgtctgtcctttgccggggaatgcccggccttgcccctgcctctgaatttgccccactgtagcacagtttctgatcctttctccagtggtcttcagcccattgttcttcctcctggttctgaccctggtgttttgagctttctgtctgcaccaagacttccgtcctcaggggtcaccagggaccctgaaacatcttgtccctctggggctgatgtaggggagcctgctggggttctgtatttatctgccagagtgtcccccgccagtgtggctgtgccctcatgtaaagaggttctcctcccgcccgtcctgccgttgagaattcctgcacccttttcccttgagtctggtttgactccatgtggcagcctgtaagtcatgttggttgcgggaaggtctacattgtcacaccccaggctcacccacctgaccatggttgggcagggagaaaacagctcttctcatcctctgccctgaggacccacagtttcattcctttcccctgaactggaattgtgtactttgtggcttttgttgtgccttttcttctatcagcaaacatctacttgttgataaacccgtgactccttcacaagtgtgggtgttgccctgcaattaaaaggtggactgcttgcctgtcatcccagctactcgggagactgaggcaggagaatctcttgaatccggaaggcagaggttacagtgagctgagttcatgccactccactccagcctgggcaacagagtgagactcttgtctcaaaaaacaaaacaaaacaaaaaggtagacagcccgtttcctggaagccactgggatctcgctttggcctctctgctaccctaccctgtgtcccagcagcttcctcaatacacttggccaagtttccttgtccctgagacagaggcttccgacccttgcatagtgattctagaacttgatccaactatctctctgcatcgggtaactgccattgggcagttaaaagacagcagcccacttctccaccctgcctcggtcccttgcatccagcatgtgagtttatttggcagttcttctaaaattacgttggctgagcacggtggcttgtgcctgtaaccccagtgctttgggaggctgaggtgggagggtgacttgagactaggagttggataccagcctgggcaacctagcaagacctcatctctaaaaaaattaataaatgaaatggaattatggtcacctgaacttaattacttttaacaaagacaaatttattggttttcacatctaaagggaattcaccaagatgctgccaaagaaagagcatatttattcccacttcctgcatagtcttaaaacacttgaaatgttgtttttccaagagtaattttcaaatacagtcatttctctgtattcatgggggattggctccaggaccctccagaataccaagatcctcagatgctcaagttccttatataatacagcatagtatttatatataacctgcacacattctcccgtataccttaaatcatccctagattacttatacctcatgcaatgtaaatgcaatattttcttatttgtattttttttaattgttatattgttacagagggctgagtgtatattctttcttaacgtgtgatatcaagtaatatgtgtccagaatgcttaagatactgtgtttgcagacagggagtctcattaccagaaataataataataacaataataataatgagtgatgatgatgctgcactaaaggatcagtaactcactggccagcaggcccatcccccggctctcagttgcttgttcaccttccccgttccctgcccatcagccagtttccaggtagtgtttgactccacagtgagttaagtgagctgccagagagcagtcactgtccaccgaggcttccctgtagttctctgattgctgctggtcatttgcttccaaggcctagaaagccagataccccttggacatcttcctggttcttagcacaacagttgacctttttacttccagttttcacctgatttttcaccagagagcttcagtcttatctagattttaatgatattcccatctgagacagaaaggttattacaaaatggtttcctactccatggaattttacttggaatttataggaggagcctaatgtaccctctgataagcaagagttcaaaaaatcagattttgtgtgtagacttacttcctaatgacccttgaaggaggcacctgctgtgtctctccttacatctctaggtcctggattagttcaggacacagaagcaaaactctgatttaaatataataatgatgttaccagtactctatagataaaaatctcatgatttttaaagtactttccacagtggaagggtcatagggttttaactcatgacgtctgatagacccttttgttctaggttgtaaaaggtcttttttttttttttatctctcttggatgtttaacattttcaacaggattacatgcagaatgttcatggtaaggagattgaccttctgagaaccactgtgaaagtcccagggaagaggccaccccgagccacgtcagcctgcgcacccatctccagccctaaaaccaatggcctatccaaggacatgagcagtttacacatctcacccaattcaggtaagcttacagcaaatgcactaacaaatcaagttcaacagcaacaggtggtccaggctcgaggataatgttggactcctaggttaagtggagacagtaactatcacattacagattaaggtttagaaacctgatcacttctgtggctgatcatttcctttaaactttcagttccgcaaatgccagcgagcaaatggtgctttgagtcacagctgcaaaaaccatgcatctaggcctttccagggctgcatagtggaaagtgaagttaacatgtgaactgggtttttaagatccttctgaaaaacgtgaattaacgttaaagtgtcaaagattaactcatttctgataactgtatgtatgaaagtggaaaaaccattcggagcaagattcagaggaaaccatttgacctatataaaatgtaaattctgtgttgttatattttaattatctgccattctttaatgcaactttagttctctgtattctcttttaaaggagattttttttcattcaggatcagagaaagctgtattttctcaaatgttgatgtgtttagaaattcctggcctctgtgcccagttgcaagccatccaaaatgacattgttcattttatttacgtttttgcaaataattgccctgtgtcatgaaccttcccatgtctgctcatcagagataaggagaagatcctcttgagccctcccataaacacacacacagagtcaggctccttcaacatggggacatcccttcaagaatttgcattttctcctgcagaaagtccagaactttcttctctcccacctacatccagtcttcttaaaacagatttctggctaggcgcagtggctcacacctataatcccagcactttgggaggctgaggcgggtggatcgcctgaggtcaggagttcgagaccagcctggccaacctggtgaaaccccgtctctactaaaaatacaaaaattagccgggcgtggtagcaggtgcctgtaatctcagctacttgggaggctgaggcaggagaatcgcttgaacccaggaggcagaggttgcagtgagccatgattgcgccactgcactccagcctgggtgacagcgagactctatctcaaaaaaaaaaacagatttctctcctatgagagtttctggtctttgatgctgcactttcctcttctgaaacatcaagtgcttttaaagagggatggtgctgactgcctggttctgaggcatgaacgacactggtaggtgagagcaagatggtacagaggagttcaaatttgggtccaccatcctgggctccgctgcatagtgttaggcagtcactgagctggttccttcccaccacattggggtgctcttgcctggcctgcctgtgttgcaggggggcggtgtcagaggagacaacatgaaagtgctgggaaagctggatacaaacacaagctgttgtttctaatcaaagttaaaactggctttatgctaaaggagtctttagtgcctcccaaaaaagtgagaacagtatttttccaggggcttctatgacctgctgacctttcttccaagacatccgtgagatttttcttattagagcggtgtgctaactatggggtgggaagagagaaaagaagggcacaagaaagaaaaaacaatccgtagtgagtaaaatgctgaaggctttattacattagtacgttacataaactcatgcatttattcaaaaaatatctataggccaggtgcagtggctcacgcctgtaaccccagcactttgggaggccaaaatgggtgaatcacctgaggtcagaagttcaagaccagcctgtccaacatggtgaaaccccatctctactaaaaatacaaaattagctgggtgtggagatgtgcgcctgtaattccagctactcaggaggctaaggcaggggaatcgcttaaacccaggaggtggagtgcagtgagccgagatcgcaccactgcactccagcctgcgcgacagagtgagactccgtctcaaaaaaaaaaaaatctatcaagcacctattttgtgccagaagttgtgcgcactgcagatacggagtccctaacctctagaattcttccatttccacctcccttctgaccatcacatctagtcatctagttacataagtaaaagcatttattgagtttcatttttataattttaaattgataaaaatgtattaaatagaattaatttaacttaaataaaaatttattgatctttgtaacatggtgttttgaattatgtatacattgtggaatggctaaatcatgccatttgtggagtttctaacgtgtgcctgagtcacagttcccgccttcaggaatctcccctgttgttggggagaaagacaagtagatggaggccacacggagccacaggccccaggagggctgtgtaaagggcagggcttggagacccagtgatgctgcggtcggctccccaggaggtaggccaggcttcaagggatgggggctacctgctgagtttgaataaaggataggaatttgccaggcacacagatatgaaggaagggcaccaattctgtgaagaagcgttcactatgtaaaagtaggattttgaacttcctaatcttgagatttatgttccttggagccaaatgccactgttgtcctaagggaaacactaatgtgtgattttaagtagataatacaaaggccctataaaccgtaccatatctgatggagtcggctgtggcatgggcctttctctttgagggagtgagttgtgtgtccttggaaggcatttcccattgcccagtttcattctctttaagagcccctgttgggcaaatgggagggttgcgacaagattgaaatcccttttccatggtcacagccctcagtgtgtaacaggacatctccgcaaccctcaaacaggttaatcccacacaggggcctggctgactttccctcttctctggattccaactagggatagagaagtggaggtatgaccttagcacagaggcgttgccactttgggaagaagaaagtgcctcacggccacagcagtgctaagggaagtggcaccctgaccaagcatgcgggtgaagtcatcagctggtgtgcggcaggagggcgcagatctcagatagcagctccctgtttattgctcagcttcattcttgggttctgagaataagccatgggcggaggcacttctgtaagaggaagcagcttcattaaaatcttgggaaattttaatttgcattcaccttctctaaacatgaacatgaatctgtaaagtgatacgttctttcttgcttaagaaattaaagcatttggggatttgagtttttatactctttgaaaattgagtttcttgtgctaaaatcatcattcacaaaatgtcctctcacctgaggaattccaacacagcaaattcaatctgaaataaattgaggctacatttaagagacgggacttccagctaaaaataggtattagagagctgtttttgccaaaaaattgaatacttaaccttattcttcactcttgactcatttgttttgtctcagttctgggtgaactggagggttttctttctttgtattttcatttttgtattcattttcttaatgcgattgaattagatcaacattttatgccttctcttcccgtaacttgcattcacatagacctgatatatgtatgagcctaaatctttgtggttaacacttattattgctttggaataactgtccatatatggaatgattcattcggttggtataaccatttacagggttcttgatacacatttccaaattaacttctaaaaggttttacatgaaaactcttcccatccatagccatcaccagtttcacctcacacacttgctaatgctattaatattattgttagaatttatgctaatctgatgagcgataaaaatgcctcatgttttgtttatttggatttctttaatcggtaatgaagttgaacagctcacatgtattaggtgtatgtgtttcttacgttgtaattaattgtttaggtgtatcctttgcccatttttgcactaggttctttttcttattgatatctgagaactccttgtatatttaggatatgaatatattttgcaggtatttccccagtttattatttgccttttaaattttatggtcttctttacataaaaaggttttccctcttttttatttataatcagattatcttttactgttgtgatttctactttaagctatttagaaaacctttcataatcttgaaaccagatcacagtttacatatatatacttctaagttttaattttattgtttttttcccttaaaaaatatatgtatgtgtttatgtgtgtgaatatatgtatatgcatatatatctgtgtgtatgtgtgtgtatacatgtatatgcatgtatttagcccctaatccacctttaatttgtttgtgtctattgtgtgtgatagaaatctaattgaattttttattcaaataaataatcaactgtcgtttttctctttgttgaattttttttctttccctattaattccatatgttgcctttgttgtagaactcaatcacttcatcaaatgggctgtgtttctggcctctcagatgtgttccgagacctggtgtccctgcattgtcttaccttatgtagatttaccacagtgtcttagatgtatgactccgtttgtatctggtagtataacacagttgaatatttctcttttatcttccagtttttcttggctactgctgcctgcttatttttcctcaaatgaactaaagagtaacttgaaaccttctcctccttgataaaaataatcccctcattggtgcacatgacatcaggacctcccgaggctgtgatacgggcacgtaaataaaataataaaaataattctatcatggcttttaactggcattgcttttaagctatgaattgtggaggaagtggcatctttactgtgtggagttccttatcgtggaacactgttctttcccagtttattcaaatttgtattatagcctccagcaaagttcagcattttttttttttatttagctgctggacatgtcttgttaatctattctgtttataatttttggtgcattgtgaagctaatcctttttagagaggcggggtctattatgtcatctaattggtcagaaataaaactcctaatttttgtgttttctattattcagccatcttgctgaactcttgttagttggaatagctactggatgtttctgttgattctctagcacacagtcataatgcattccatatttcaaatactataatgcctaactgtgtgccaccagtttactgatacagagactggattgtgttgcctcctgtgccattcgtctccattgttactgagtctgctgtatgcccacccttgattaatgctctggatattggggtggggggaggacaagacgtctctccaggagccttacactcaagtgggggtggaggagtccaaagataaacacacaagtaagatcattgtaaggaatgataagtgctgaagggccatatggggcaattgaatagaaaatacctggaggggctcgggggtggggtattcctagcatttgggaagtgatttgcctgtattgaaatagtgactacatttcacactttaaaatgctggaaatgtggtcatcttcatgtcagtttttgccatgggcttgggagagaggaagaaacacgcactgtcagagcagctgccttgtgcactgctgatgactgggctcaggccaccctctggggctcatgcattgaggagagcagaggagctgcaatggtgatggggtggctctgggttccttgtggcggtcgtggagttcaggagtgggctggggcacagcagcaggctgtgcgacgaaagcaaggagagctggccagtgttgtccctgccaccaacacccccaggagagcatgcatcggaacaggcagcatgcctagggagagcagaaccttttgatgtggatgctggtgctcaaaaaagggaaacagagatgattgtgaaactcaaacatcctcagtctcagaagaagagaaagaaatggagaggcaaggcagccctgaccgtaggtggtatgaagtgcaccggccagctcacagccccccacacggtaggtctaaatgaaacccgccagtcattatgggccatacacctgctcagagcccacaaccagccttctggttggccaaggctgcagagaaaaccccttcatctgcctcatcaacccacatgctcttattcatagataatggacaacgaaggtgtttgtgggaaccaacagtaaaatgtgaaggataactgatcttagtaagagtgacattttagtgaaagggaatttaaaaggaaattataactcctatcaacagaaggatttaatacgttagttattaatgatactcataaaatgaggcaaacagagagcacgtgtttggcccagcgcagtggctcatgcctgtaatcccagcactttgagaggctgaggcaggcagatcccctgagcccaagagttcaagaccgattaatctaggcaacatggtgaaaccctgtctttacaaaaaatgcaaaaatttagctgggcatagtggcgagtgcctgtggtcccaggggagactgaggtgggagaatagcttgagcccaagaggtcaaggctgcagtgagccatgatcatgccactgtactccagcctgggcaacagagtgaggcctgtgtcaaaaaaataaagagtatgtgaaaatactataggagaaaaagttttatgaataaagattgtgaaaataaaaaattcattagataaatactgtaaagaacgtggctaaagacatgttggtagtcaaagatgtaacagaagaatatatgctagaagcaagtaaggatatctgaagagtcaagtatcaagttggatgggagaggaggctctgcaaaaatacaaataaaatcttaaaacacaccaaaaataggagaacaacaaggttacctacaaaagaagagaaatctgactgtagacttctcaagagcaacatgcattcttaaatataatggaaatattccctcctaaggacaaataattctgaacctagaagcctatgcaaagacgactactaatcaaatgaagatagaaaaaaaagacatctttagacaacctacagggttatacaacatctctgtcttaaagggttttgaaaaaattactgaagggtctactccagaaaaaaaaagaagaatccaaaagatattcaggcctggttaaaccttcccttcctcattcaaggtcactggcttctcaagatgtgcatggccattatccacttccattcttttggcctggaacttacatagtcttaagttgccattctaatgaggatccaccagaagccacattttggagaatcttcccaacttgaatttcaggtataggtccagagaaggaggtaaaacgtcaaggtattttctgacatgaatgtttggccagcctagtttggtgaagctgtatccacatgtaacaatgcagagttgtattagcttccacagttattttcacatttaagtagagagcaggaaaacataatgtccaagagcaagggtttcggagtccaaatcactgaatagaatcccatttctcctgtctcagacccttctgaagttgtctcactaaaccccagcttccttgtttttaaaatggggaaatgatgtccacctctgttctatggagaagaacacacggcattcctttgaaaagcttggccgatgctgacttcacagaattacatcattaattcatcatcatggttatgccaaaagcaaggaagaggggaaagaaattatgttcttgaattaatttttcaaatacaataaagcattgacatagcctttgagtggacataatggacatagggcttagacttcacaaacccatgctccccaacagacagcatcccactatcatggcagcaagggggcagacagaagaaatgctcttctggactttcatggatgtccatggagctgtctgctccagttctgtgtcctgtggtcactttattctgtaactcctggttgtgacatttttgttctaggatgacagataccttcttgtctctaaagtgtgtctttgttgggtttttgcaactatggatatgtttttatcctaaccagattgatgcttagacctttgtcaaaggaatcctttccccttctcctctacatcccccccttccctacttgaggcccccagcggtttcgaaatattaaagccttcaggagggttgaagctgattttccaggggaggtgggggaggcggggacagcaaatgtgttttgagtattgaactgccgttgacatctaaagtctcaaccatgctgttttctccacacttcagcaatcaggacatccagcaaacccataaaaaaccaaactaatagcatgaatattcagtgacctagaatactaattattgtcatgaatattaatgtgatcggacttgctctttcctctcctctttctctctcgtcctctttctccctctctccctctctttttttccacttagccggctctaaagatgggtcataatgagagcatttaagagggagcgctctccgccgtgacagggaccggggtaataaggagagcttgattaacgtggtgcacttgggggagagatgagaggcttcacgtggtcctgttcgggggaggcaatgaggcaccggcggctctgttgctgctcccggagattaatgaggcctaagagtgcattaggaacagtgacaaaggtttgatctaatgggctcagtcatttttcctttgagtgacagacgcacagaagtaattggctgtgcagaatggcagctcattggcggtacttaaggatacattatccccgttgtgtggcccgcagaggctgtttatcaaaactgctcacactgcagacgcggagtcgcgaagctgctgtttcagtggtaatagctattaaaaaaaaataacgtgacatcaaaactagacccgttgttgtctcatggaaagaaagtttttctttgtttagtttcaaacggtctagaaaacattataataactctggagtccggagtctgttgtgggccctggatgagcagtgtcagtccacacctgtcccctgccggcatgcggtgtggccaaggcttggtggaacacagatccttgcttcccactcatgtcgaccaaggtcactcgggagttttccacacattggatcttggttacaacatataaattggaagcttctgctaagtacccttctagcaccttggtagaccatttgcaaatggaagccttactggtcgagaattatttttctgaaataaaacctcaatatcagtagcatgtgatatctgctttcataaaccaggttttgttggaattggttttaatgtctatttgacaatttttagggaaaatgttaatgttttgtgaggcttctcagacatcagaaagttagctaaatctgacattagaggacactaaagttcatcttagttctttttaagaattgcagcatcttcagcttttatgagcaatgcgttctcactattagttgtttccgtgtttatacattgctcccactgaggtttaggcaaattcgtgtggtattgtttccatcattaaattgtaaactctttgaggcatacactgttacttctctttctttgttatcctctcttagttttgtgacctagcaattattttctcattaggtatatattcctgcatgttacccatcatgttaaatgtaagtgatggatgttgaggagattagttgctttcctgcagataatgttcccctgtagtagctctctgtggtcctgagcattggtgtgtaattcagaagtaagtattgtacttcctaaattaaggatagcttcaattatttgaactctaagtggagtgttcttttctgaaagaaccaactaaagcaacttgattcctgatgatttcagctgagacatatcaggggatggccaggaccttgagttggatgtggtaacaggtgtgcctacaagtaaataaaaggtgcttcaaacactttttttctctcaaaaatgtgtgtgggcagggaggaatagtgtttcagctgctgaactgatgcttccgagaccagcgaagtggtctgcagggtcagctgtgggaaagaggaggtgcccggaagagcctctgtgaattacccgcgccccctccaccagggagccagctgccagccccgggggccagtgagaaccgaggccttgggaaagggcttctggttcttccaggctagagttgagtccgtggcttccctgcttcctgcagtcctttcccacactggcagaggagagtttttcgaagtaatcgtgacatttttccatctcgaaaccttgtggcccattgttttgagttaccactcatatagtgaacgtttgcgtttctggagtatttctagggagtggtcaaaccccgtaacatcccaaccagcaaacctgtaaaacccgcctcatgttatcagacttgtgagcccggggtactccttggtgctttgtcttccctgtgtcattgctggattcagttgtgagatcattttgtaagaactggaaagcagagaaagaagtagtagtgaatacttctcaggatagagctgtggggccacctgctcctggaaggggactgtaaaattcagagatgaccggggaacgctcccctcaaaacagtgttgtcaaatgaaaatgaatttcatgttaaaaacacacacacacacacctgttgcatttatcatataaaggagaaagaatattgtaaagatggaaccgttattcatggcaaaggaagacaccaaacaaagaaaaattcttttcttctccgtcttcacaatgcttacacccctcatcctcgctgttgcatcagcttgtccatataacccataccaggagatggattgtggccaagacaagccgtacgatggcgctctccataaacactgtcggaatctggagcagcacgtgttccttcagcagataaaaatggcaaaatgagaatggcacacattgttttgcaaaggtcggaataagactccacgttttaggaagtgacgacgaaccgtctaattctaggatgttgaattctgcttggccacgttgatgtatttagtagtcgttaaatttgtcattgcaactgggtctggattctgtatattcttttttctgttatgtagaactgtgtggctggagaaagcaactttgtctttagaataaatacttacacttatttctaaatataattacttaaatgagaacttagcgtctgacatggtaaatattttgtcttaaattgtaccaattgccacatgatatccactcccaacatggagcagtaacccagggatgggagggaagggatgactctggcgctccagctcactgtcacctgctgtcaggccatgtccttcatccgctgcatgcgcatggtgccccaagcgcagggttgttgttttttttctctccttcctttcttttgtaaactgtacctctgacaacattggcatcgctctgatcatcagacctttgggatgctggaagatggggggtgccgtggagttctccacagcaccaagcacttcactagttgatggtgggtgttcagtaagtactcacagagggaatgaatgagctcaagcaaagtgatgccaactacagcactaaagcaaacaggaggcagatggcatgcacagttcatacatgaagagacaccattacaagggaaacataaggaaaatattcagacattttagattttaaagacaaacaagattagcaacatcaccattttaagcttttgctaaaaaactgtagagataggaaaacccactgttgatgagattaataactgatatctgcagaggttttacagtttacagagtgctttacataatttgatcattatattaaccacatggggcatactgttatcattatcaccatttcttcattattattattatccacttagaaattatggactaaattgctttaaagatgcccaggttccatcttcttttagttactggtcattaagaaaattaattagcaacatatatcatgaatcagaaagatatattatgctgtttgttccagtaataacgctgctgagaatttcttctaaggaaaattcaaaagtagaagatgtcctttgcagtgttgtttatagccagaaattggaaacaaccaaaactatccagaagtagaaaaatggtgatataaattatctacattaaatcaataatgttacatatctaaaattatgaagattacataacaacatggggaaaatggttaggaaatcatattaaagaagtgtataaagttatatcttttctgtggccataaccaagaacaatgtatgcatatgttcaataaaaaattgatctgttagacgagattttggtggatttagtttacattatttgtatatctgtacttttgccaagtatattttaacagtacaacaaaataggcccccattatttttttccttgacatcataatttagaacagggagaaagcagcatacaatgagctgtttctacgttgtaggaaagagctgtgtaattccaggatgtggaatcctaagcctggccacgttgctgtatttagtagtaattacatctgtcattgtgactaggtctgaactctgtactctgtcttgataaacataacatggaaaatctcttaactaaacaaaaggtatcaagaaacaccagatttgtgtcttcctagtagatatgttgaattgtactcttttacaaaacaagtatcacaggatgcagagtcccgaatgcctacatcttataagatactgaatgtgtccttggaaaaaaaatcctctcagcctgaaattccacttgccaaaagcaaggcagatctccaatgcaaatacaggagcgaatgggccccattcacaggccttaaatcgtgtgtctcactttttatggtagtgttgtgaattctgttctttttgggtttgtaattagaggacagaacagatggcgaaggcctagtttgaagtgatgtgactgttaacgtcgcctccttcatccagttgtgattccagggaacccggttttcccacacatgcgcacaacgggcgtggtgcagctgtagggtttgcaaggtagccgctcacgctgagtttttacagcatttgaagctgcctgtgaatgagattggaccgaagaaagccgtccctggatgtttctaagggtgaaggctccataggggaagggtgaattcttgtcaatcatattcctgtaattaggatttgttaaaatagaaggtatacaattctgcagtgggaataaacgtctgttttacactcaagtgctcatagaatcctttttggctttttccccgccctctttctatgtacatgaaagttcctatcgccatcaccaagagttgctcctcttttcaggcttacttaaccaataagtcaaatgccagctattattttcctagttaaatgctttggtgaagttaagtcctatttgtaaagacagaccaaaattggaaggcgcagggaatgaacttttgtattttgttattgttattgtaaagatttgttgatgaatctttatttgaatgctatgaaaagccatcatttcagagtatatttttaaaaatcagaacaggctatttttaatgtaataagctaatagcttaaaagagggattctgtctttgatgtcatttggtggatgaaaacattcttgttcaatagaaaaccagcatctttttcatgctcatttgagatcagttcaggcaacatactgatattcattcagatataaatgccatattcactttgaaatgcaaattgtgtaaagaaaaatagcatatggtggaggtaagtaccttttcaaatcaactcttccactttagggatataagtacagctaaaattattctttggaaagaatctggcgcttttgacacatggaagcttgcactaatcaaggcagctcagtaagcacacacacatatccatatcaaggaagtggcgcagcgaggacatggattagcatggtaatgcagtcaccccctgctaatcggggcgagtaccagctgatccgtagatggggtatttgaggaaacactctttctgagttcagaatgggccatgtcgtcagtcatgtatttcatggtaacgcaaataatatttgggggacgatgccgaaaaggtccttttatgactgccttcctgtggaagccagcatcctatactgtttggggctgggccactttttaaggacttattgctggtacagctgtttccttgtacaaccctgttctgtctcttacacttcctgacctgacctctgcattcacaagccattccaatgacattttctaggtttttggataagtgttactggtacaacatacacataagacgcacagaatcataagtcatagccacgtttacaggggccgccactcacatccagaagcagcaggtagccagccctcatggaccccttcctgtcccgtgcacccccaccccaccccaccccactcacaagggtgaccaccatctgatttctcactccgtagatgggtttcgcctgtccttggacgggatcctaacagttggcactctcgtgcttgtctccggctctgtgttctgtgtgtgatgtcaccgcagttgtggcccgtgtcagtagttccttgttgtcattgggtaatgttccgttgtgccgtgatgtacctacagtgatggacagtgccgtcattcccagcgtggggctgttatgagcagtgctgctctgaacattctagcacctactttttggtggccatgtttatgtgcatctgtatgatttaaatctgaaagatgtgaaaggagaagagaaatcttaaaggaggaaaaaaaaagaagtggacttgaaatgttttatgaaagctttgcatccagtaagtcaattagaagagtggtgtaggttgtcctgggacagccccgagcttaggaaacccccgtgtttaataagagcacgtaagcaagcctgtccaaagtttgccgtggagagtgacatttactgtcccagacagcaaacagatgtgcccccctcgctgggagtagacactacccctgtctcaccagtctgttcattctgtcaacatcccttgcaagatactaccttaagtctaaggtagtatcttaaggtagtatcttaggtagacttaaggcagtatctcccctttccatctattctttatctagatgggcctaattccaaagtctaaaagctgcagtgtcccctggagcctctcctgtaccttccagcagcggtgggctccctgaccctcatactttctggctgctcttgtgttactctgccttgcgtttgggccacatgtggatctgctgtataccttctactagactagattgtaggttccctaagacagggactccttccttcattgtgcccaatgcagtaggggctcagttccatgcggctgctcggcccgctagaaggtcaatgttagaataggcggcagcttctgcataccgggtcccatcttcccctactcgcgagttagcaggttagcctgccctaggttcctgggtgatgagactcctggatcaaaatgaatgacagtctcttgcagcaatagcaatagtgagagtatcagcattgtcatgcactggcttcccaagcctcagttcccacagggtgacaccagcacacacagtaactcatgttgtaagaggaaccccaagcttaggaaaccccatgtgtttaataagagcacgtaagcaagcctgtccaaagtttgctgtggagagcgacatttactgtcccagacagcaaacagatgtgctccctcttaaagtagacattacccctgttgtaccagtctgtttactctgtccacatcccctgcaaaataacacagagcagagagcacctgcccgtgtccacacccagaggaagaagaaactgaggcccgtggagagctggctgccagcaacagtggggtgggatgtgctggtagcagcagggagagtggaagtcagggaaggatggaagggaagggaagaatggagagtactcaccccccaaagtaggccacatccttgtacttatccccgagtataagtgtaccctcggcttccggggtagaagcttcctttaagacccttgtatttgcgcgtgacttgaggttggtgaattaggaccacttgttagactcacctcgtctactccaggaaggagggcattctaatctggcttttacaatctcctccttctagggaaatacagacatgcctgcaaagaacatttccaacgatggtgcgcagagttttcccacatctaaacgaccccagcttcatatcttactccttagacacgggaatgaaattctgtagcaaaacggctgtgtgttgaggtggtccctgatggagacaatccagaggctctctttcctgggcattactggggctgagggttggggcgtggcttcctgcagaccccacgcaccttgcaatcctcatggcatttctgaatgtagctctatttctattagccttcctgaactggcaactttaatgcctgggtagcaagcacttgggcgtttccttaaactcaccgtcttagctatcaggtctaggtgtgaaaatgtgatttaactaatcaacacagtagcagcagagcttggtgtctttgttgactgtcggcggccacgtgggtttaggtcccctgcccttcagcctggttgctgggtatgaggcctccacctcggcaggactgcttcgagctgacctggactgtgtttagaacagtgtttggtgcacttgtatcctagcttgtcttgatgtcaggatccttacccctcaagcaatcaaaaaagttatccagcttgtttcacaaatgagaacttcagaccttcagccttaattaataactcattaacgtgaaatgaattccagtgagtgaaaacagttgccctcgagtactttgagtgagaatacagtgattttaaacagaggctttttttatgcttaaagatatttccaaaagtgttcaaaactcctgtgtggtaacacatagggcaggtattgcttgatgcttacataacaaaactggatgccaggacagcattagtaggtcaattagttaatgacattcattcaagaacagaaatgagattacatattagactctgtatgcatatctgtatcaaaaaatgcatgagaaagtatgacactataattggatatggaatgtgcatgattattaaaaagattcactccacatttgggggtggttcgtttctttgacgggtggatttactgaaagtaagtggaaatgcctcaaaactgtggccactggcctgggactgctgacacatggcacgagatgctccatgggcgtgttaacccagcatggcagcttccacagtgtcgtggctcaggtcgtggaccactggtttgcctcagagtttaagcagatgtcttcatgcatttacgttgaaaggcaggtactgtgtttggatcccagaaacaatatttctgaccctgtgtaattttttttagtcaaatatgtttctgcattatcacacaaaatacttttgttttcttttgttggtttttctgaaagaaaatttaagtgatctcaaatatagtgaatgggtatattttgaaacagagatttactcccttaagagaaaatcggaaatgttttgcttatggaatgagcctcctcctccgcatatttttggaaggtcctgaccagaggtcaagagtgaggtgggttgagtgcagtggggtgtggggaggcaggtgtgagcctgggcaaccccggaacccactcagatccttcagacagatccagagagagaggctgtcagctctttgttcataaacacaggcccacagctcccagatgctttcattttctaagtgatgccagaaaccaccaatttttaaatgaaatctcccaatttaattctactttgaaaaaaatgatcaactaagtaaaaatgtctctatgagctcagcctggacgtcaggcgatagtctgtggatctgattgaaagtttcacctttatcacggtttgtccatgtatacaccttgatgtggcccaaattcagtcatgctgtttcagtgtagtcccgcagtgggaagtgggtgtggctggggctggggggccttcacgagctatagggctctaagagtctgccgtcagaaggattgtggatagctggtctggtgtcttccatctggacaccaggagcatgtggtcttgccaggaggttcgtcaccccagaggttccaggttggttccttggggactctctcaggaggcagaaggtgggctctgagccacaccctcagagctgctgcaccagcatctcagtggattggacttgtccttgtattttgatggacagacagaagtttgaaaaccagtacattcacagcagcattcacagcagagtcctgttgtttcctagtgtgtaggcttgaaggaatctctcccttcctttttggcagtgtgatgtttggccatgagatgaagaactcataaacctaagatgagttcttgatcagcaacctccattggaacatttcgtggtcccttgtctggggttgagattgacttggctctccttactgtgtgttgatacttacttctggagctttattgcaagtagtcagtgatggatgcactgaaatactgtcctctgccttttaaaggaaattgttctggaaggtttctaggcctggttgtcatcggagaaccactctccagggagaaggagcaagagaagcggtgctctattgagtgccatgttgtcatcgttgtcccaaagatggagggacagacagacacagtgaaattcctttttgtttttcaggtatttggaccttgtgtgcctaaagctggtataaaatgaggtctgtggacagatggcatgcttaataatgacttgacaggggtctgattgggcattgcagtgtggaaggaattacctccttatcatcttacctacacagcaggtgtccctgcaggtagagcaggcccagaagtgcctggcacagcagtcagggtcccagcaagggaggtgcccccccaatcgcacccccagctgcttgcaggcatcttgtcattgtccttttccacctttgcggagtcctttcgcccaccataacagtgtcagcagtgtctggaagccttttgtctgctcagaattcacgtgatgaaagcggaaccaggccagggaagccccggcagccactcttgggaggcgcctcctccccaaacgcaccttcgatgggtggatgtgtgggattgagagagagaaggggaagagaagcacacaggacagtgcaggcaccagggctggcagaaatgcaccaggacaacccatgggccccaagggccaaggagagagggggtcacccagcaagacaactgctcggggaacgagccctggagtcagcacccaccctcaccctcctctctcctttagattcctgccatgctcaccattggttgagcccagtgagaagctagaaggtgctggagccaacaggtgcagcccatatgggtgccttcccaggaggagagcagggcggagaagggatgtgaagggatgtagcaggaacatggtgggcacgggctccaggagggggtcccgagatgggagtatctcctctgctcctcagggatgctgccttctgtggggtctgaatgccctattgtaatagggatctggctaaggcacacaatacccagaggacagccacagggtggcttcgatggtggcacgtggaaaatacagggaggagcatgagtgctccccttagtgccatgtcgccagctctgggctgctcctccacgtctcttaagatgccacatgcctggcccacctcccccggctgctgtgaggcctggtgcaagagcaagcatgggagcaccacatggcactgtcattcaagatgtgggctccaaatgacgctgtgtgtttctagggcgttagggcacgcccatgccctgagatggagctctcagaacatcagggcttgggggcatgagaaacggcctcaagaccctacatgtaagcaggggagcccagacccgaggcttccgagccactgccctcgctcctcccacctgagccccttggatgccagtggtctgccgtggtggagttttgattgtgattttttgttttatggtggtgactttctggctggagtggtttttttaattaatgtgcacacagattgcctgggatcttactaagaggcaggtggcaggtggggcctgggattctgcatttctcgaatgcctcttggcgatgctgcttctgtaggtccgaagaccacaacctctgtggctttccgatccttccttccctggggcatcactgtgggcttttttctggaatcaagcagacctgcctatgaataatttcccttatgacgttcagaatgtactcagttcagacaacagcataaaataggtatcttttctttttttttaaggcagaactctattcttcaaagccaaacgcctcgtcgtttgttaatcgctgattgggtgtagggctcgtacactacgcttcagctcgtggttccgtggcttcccagtgctgcacgggatcgcagtgaggccgcttgtttgaggggagacctggttcctgcctctggcttctcatccatatcaccggagtgcttttgaaaatgcatcttttcccaagccccattcccagagcttctgaatcaaaatctgtattttttgaagccactagttctaaaaagctccacaggaaattctggtaattggccagatttaagaactgctaatatgggctgcgtatttattataaaatcctgcactgtgaaaaacttatgttgagacagcttagaacttagctggttctgaactaaaacaattggaagaaaattttttttaaaaaagccccagtacctccgaagatctgcaaatagacctaacagactaattcgctggcagcagggtatgattggctgagctttagagaaaggcacttaattatgtttttgagtctaaaattggtatgaccagataataattcattttgatgttgagcaactgattcaaatcattaagtatacaatggaatcatttttcatcacagcccctgtgctctatgaagtcacgcaggttgtttttcctctgcttagtcttttcaaggttaagagtaaacttatctggttgaagagcctgcatttcctccgtgtcgtgtctagggactttgatttgtgttgatcataaagtatggcttccccatgaaaataatcctctggcaccagacagttgactctcaatgggtgatcattttctgttccattggtagggtgacatggccgggctcctggagcccccatcttgccggcctgccggatcgcggtgtctctgctaagactcgctgggtcttttgtcttcacttccactcgatgttgcggttgcggttgggttgcgtctttgtatagggttgttcggtgcgagccatctgtggcatcgggtcccttcacattgctttgtcaggcaccatcaagattggcgtcccccttttattcctcccgaatagtttctgtctggcgcttccgtttgccatgcaggcaggacaggggctgctctcggtggtaaggtgcactatgtgccagcgtgtgggtcccatagactaactcgcgctggtttctgtggtctgcagtccgcggtggtgttcacctgacttgtttattcctagggaatgtcactagtgcatctgggtctcagatggcaagcggcatcagcctggtctccttcaacagccgacccgacggcatgcaccagcgctcctactcagtctccagtgccgaccagtggagtgaggctacggtcattgcaaactcggccatcagcagtggtaagagggggctcagccccacggacccgcagccacctcaaggtccttcgttgtaagccaggggctggacaggacgccctaagctctcatgctcctctgggagcgcagcaccctgtggggcggctgcatcagagactcacatcttgcctttcatctgtggaacgttttgtccttgctaggctgtcttgcccctgtcatctcatctgttcctctttggcacagggaggaggtagtcatcccatttggtcagtttggaaactgaggcggcagacagggcaactggcttacccagggtcacgtgacagaagtggcagcgctgagaaataagatctgattttatctccccaatcacactgccctacgtggcgtggcccacactcttccaccactagtgcacattttatatcattagggtgaattcagtctccttgtctgttttccagaattcctggtgtaccctctaaattctggagtcccctttgtaatccttcagttttcaaattcctttggcattattattattattattattttgacaagtgtatccagctttttggggaataagcatgcacgttggaaacgatctcgccgtctgtgtggagcgtgaatgacgcagcaccgagggcaccctggtggctgcagcagggtttgcctgtggcgttttgtctctggcctgttcaccggtatttaaaggaattcccactgttgtatgtaatctatcagacggggttttagagtaatcttagcataatttgttctaattaaaagattcagcatcaggtcttccctgtagacccaccagctgctgcagcaggacgtttgctttgggtaaacatcatccttatttctagtggctccgcagacgccaccaagcagaagccttaaaggaagacatctccaaaccaagccgggagacgcggagtcagcgaggtagctccacaccatagcggtgcgggtctggaagagccttgtgacttggagcagacacacacagcgtcacgcggctgccccggctggcccattcccatcccagcgccagggcttgctccttccctcaaaagaaggtgctttgttagatagcaaagatctgcctgcagcttcttcaagggctctctaaggctctctgcctcatctggaatcacgatgataaccctgaaaaccccaaacaaggaggtttgaagttatgataaattaaccgtctacagtttactctctttgtaaccactgcatgccccagcgggcctggtagtcagcctttcatcagccctgtgtgtgctgcagctgaagccccgccacctgccagccaggcagcctaggatgagcctccgtacctccatgagcctccgttttcttatctgttcaatggacacgttctcccctcccttacgtagaagttaggcatgtgccacaacacaggacagtaggctcttcgtgactgaagaaccactgttaatcatggttcctttaggaggagcagagagttcacatactcgtttcattatcaaatactttaaaatatgtattatcaattagtattactatttgataaggtttcattctgtggccgccatctcgtgaaggtgttcttgcatagggccacgtttgagggcgtggggagatgcacgctgggccttctggagccaggtgcacaggtgacacggacaaggccttgccttaccaagcagcctctgctgagtgagagtagtctaggtgccaataatacaggtgtttaagtattcatctaaaattcatcctatacagattttccttttgcacacttacctgtttgataaaaactcactaggtaactttccctctactgaatagctctttctgttgagctgtacgtatgtgcagtgggcgtttccacaccgccacatcgtgagacactgctttccagagcctccgtttggttggaagtctctttccatggaagtgggctgcattgtctgcacgcatgcatttgtacagtacccatgtgagactaaagtcgcctacgtttgaatgccagttttttattcacaaagcaatttctataatattaacacacgtgggtgtccattaaagaccagtatgctccctgacctcgtaaatcttgaaccctgaacatagaagataagaaacaagcaagcggatgccccaggtgtcagcctgctgagggacatggaaggagagctgtagggagagcccagggctgaaattgtgcaggtcgtttaaggattgatagagttgatcaaggaaagcttcccaaagaaaatcaaacttgagaaatgcttaaagaaccagatggatttttttgtgcaaaacagcaggaggaagttattataagcattggggcacttcggacaaagacccagagaggaggaaaagggaagatggaatagccacgagccgcagtgaagtgaaaggtgatagttggggtgcagaaaaatgaggagagaccagaagagatgagtgttgagagcccagcactgccaaattagcatctgattttcagacttgggagctgacattttacagagcaaagatccagaaagacagcagaatggtgcacagaagtctgattcctacagctttatgggggtcttggttgattcctgtattttctaaggatttttttttttttttgagatggagtcttgctctattggcaggctggagtgcagtggcgcgaccccggctcactgcaacctccgcctcccggactcaagcagttctcctgcctcaggctcccgagtagctgggactgcaggcacgcgccaccgtgcccggctaatttttgtatttttagtagagacggggtttcaccatgttggccgggatggtctcaatctcttgacctcatgatctgcccgccttggcctcccaaagtgctgggattacaggcatgagccaccgcgcccggcctttctaaggattaatagtatgtcataccggaaatattttgaaaagggagacaataatcgtaataataagagctacagtttattgagggctttatgtagataatctcatttgatcctcacagagtagatcctgttgttacctgccttctacaggggctgcctttggtacagaaggattaaatgtcacttgctcaaagtcacatcctgtgaggggccaggattcaaactcaggtggcccgattcagctctccatcactgcatgtcaaggtgtgcctccaggagcagcagcagcagcagcccctgggaactgcttagaaatgttgatctcaggccctgtctcagtcccactgaatccagtcctcaggggatgggaccaggcaacctgtgtatagcaagccctctgggatcacatggcatgctgaagcttgggaaccactgctgtaagtcctcacttcccaaagcctggtccacggaccaagtggcatttgacagctccggggatttggctggtgatgcagaattcaggctccacccaggcctgctggacgcatccttgtctgtctgcgccgagggtaccatcccggcgtccctctggttcgcgtcattcccccctttagtgtgctgcttcgtcaagtggccagaccccagcaatgtttagtgaacaccagggcacaggatctgatggacaacttccagaaaacgtgtttatgaatggatttcaagactcagccttggcataaacattccctgcagggcttagaaaataatcacagaagaaacaaacatgattaagagctttctgtcatgctctttcttcttaagttgccggtgatataagtcccccctgcccccacttccttttcgaatgtatctgcccccatccctagtctttggtttggatttcagagtcgcttactctgtgctggcagcaggaatgaatggggagagcctaagcagctttggaatacagacgcccgtgttggcaagtgtgccttcccattgttgtgcactcttactctaaaacataataatcacggcaacattgggattcactgtttctccgccccccgtccaccctaaattaagactttggctctggagaacttttcaaagtctcctctctagacacaccggtccccccggggtttcttcctttaaagcagctgtgagaaactcctaattagatagattcctttgtaggggcaacctacaaaacaggaggtgctgcttaaattaagggaagaagaaaagaatccatttcgtgaaatggaatgcccactgctttatgactattactgttgtaaggtttcacatttaagtacctgaggtttaaaattaaatgtctaatataatttggcgttgctaacatgagacctgcatctgcccttagagaaaatgcagacagctcggttgagggtttcaaattgccgtctgccggcttgcaagccgcacggaggattggatccctcctctgctgagtaccacatgctgctgagcgtaattttttaaatgcagaaacatattcatcttgagcctctgcattgaaaaaggccgttccaggagtacatgaaaaattaatttttttacattttttcccactcttctaagtgtttgacagaagtaatttttgcagcaagagagaataaaaactggtggctgtaaattcctgtcctgcaacctcttgtgtagattctttatggacccagaattgatctacatgtcagatcctgttgtggtttaaactgtttatcactgtaatggcagtagtgagcccgtgaccaccaacttataatcctgggtgaaagaaattggtgtttgcagtcaatgaagaggcagctttgctttattgatagattcagaacaattatctctgcaacaactattggctgagggttctcttgaatcttattggaagcctgtaattttttttgattaatcatttcctccataggtaatttcctctagaagcgttagccacgagtcagcatcactgtgggtagcaggggccctggggggtcgtatgtggcatacttggccgtcctgtcttacttcaagacaagatgcacgttgagatgcgtcacacctgtcctcagggccagagtgctcacctgcctgcctgcctcctgagtacctgggtgagcctggcccggccctccccgctggctcctgcctgggccagcctcgtcgggtggtctcagctaatgctgttgccatggcagcctcgctcccccagccctggactgtcaggttcttctgatagctccaccccatccccgattgcttcagtccaacagtttatcttctgccacgctgactggccatcactgttaatactgcatttcttcacgtgactcttccatgtggctcttgagcctcacttccctcggcctcccccaggccaccacgcagcctcgtcaccatcgagcacaaacaccatgtccatcttccacatggaaggagtgtatcacatgtgtgtgtgtacgggtgtatgctctggtccctgtttccttctggccacgtaatcattatatctttccagtagactctgtggttataaagcagccgatcctcaatggaaagcatttgagtttttgccagcttttaaatgtcttttctcattataaaaatgttttgcacgtcgattttgatgatgggggttcgaaacatgagtttcagcttcggaagctgtctgtcccacacttactttcggagccaatgcatttgaaccacactttccagcaagcatgtccacaccattcatcaattttaatcattatagttggagcattttttttctcttcttggatattatactgacaattttagtgtatgaccagcaggcggcggtaatgtgatactgccggtctctgacctggaagcttctttgatgggagggtatcagtgaagcgtggtggggaggaaatacatgtgttgacagcctccgctgttgtgaccttcatgcctaacactcgtttccctggggatcatcatctctgataactgagcttccaaaaggctgagaaaccaagaccatacttatcattattagccaaaattcaaacccagatctttctgatttcaaagcttgtaatcattcccctctgcttttttttttttaaggagaaacgcatgcttagtactaaaacattgtatcataaaaattgtttgtcttttgatagcgcttgcttttcaaggaaatatgttctaagatggatagacattttgtcttctctcactgatgctgaagtttcctttatcaattcttcccaaatcttggctggcattcaaaagcgttccctgggggttgtcatcaaccttcagcttagctcagtgttaaaggcccctgggctctcatctctcaaagctgggcactccctgcctcaccgccgggagggctgctcggctcgccaggctggccggcctaattaaaaggctgaccccgctcccttctgtgctcggagcctgctttcctgtctctgcatgtggccgaggagcaggcagaagcgtcctggggtaactggacacagggggtgaaaggtggattttttttcctcccaatcagaatgttgtaactttgtactttgtctccttagttccttcctatcagctattttcagcagtagctgctgaccaggggaaacagaggacagtgaaatgctgccccatgatcaaaaccgaacaggggcagcacatttcattcccgaagaccagaaatcttcatgttgttgcaaggcaaaaaaaatctagaaatgcttgtaaacagggagtagagaaggatattgttgctagttgctgtagtgcccggaccagacctcttggccctctggccctcggcgtgtcttcacctattccaggggctcgcagccaggggtgattttgtctccttgggacagttcgtgatgtccggaggcatttttggttgtcacataggggagggtgatgctactggaagctagtgggtagaagccaccagggtgctgctgagtgtgccacggggcagagaccagccccccacagccaagagttattcagcccaaaacaccagcggtgccacggtcaggaagccccgatctggacaatgaaagtttcgcttccttggccccttccagctgcggttgctgcgttgcacagtaattcagtaagaatccttcccaaagaaaggaaagccggtttctggtttgcaagagggtcactgcagccaacccagagcagtgcctgatcctcagggtgctttccacacagcttctcagagcatccgcctggcggcacggccggttcagcggcagtcctgctgccaccagcgtagatgtgatgtaacattcatggaactcactgcttgccaggcacaggcccccaggagatgagtgccagagccttccctgcttcagatgaggagatgagtgccagagccttacccgcttcagatgaggaagcaggggcagaaggcagttgggcctatcgcagcagcaggtcggtggtcaaggctagattcaaacagcctgtgtcataattgtcactaagctgttctcctgcccacccgaccgcctccaagaacgctgggtgcgcagcgtgtccccctgctgcgcgtatgaagacagggagggtgaggccatcagatgtgtggatgccacaagctgagacataatctacattgaaatctccagatttagagactacaaaatgggttgaaactaacaaattgaaacagagataaaatcttgaattcaggctcaacaaaccaacagtacagataatggaacaggagtaccggacctggtggggaaggcttgggtgtggtttgtctgcagaaacgctgtcaagacttacattctgcactaagaggacgagagaggttctgaatgtctcactgggctccgaggatcctttcgggggccacattttgagaaagacatcggcacactgggaagcacatgaagcggagggccgagatggggagaggggcctgaaacccacaacacctagcgtggctgaaaacctgggagggccggaggaccctctcaggaaggcgtcgtccaatggctgcccattatattcttgggggcgatttttaaaaatacttgttcctggggccagccgctagagatctagtccatttggcctgggatggaacccaagcagtggaatgtcccccaggggtttcagatgcgcagccagggttgagaagctctttcagagggacctgaatgatgtgtgtgaatggtggttataggacaaaatctgatcctgattctgtataaacccagagaattgaactgggagcaatgggtaggatttgcaggaaagacaactttgacaccaagtagtatgatgcagtgagacaggtcccagcgactgtttccagccttctcctctggcatctctgccttcctctcccttgcctgaaggccctctgcatcctttcccgatgaaactggggaacgtccccacttctctcccatgccaaaacccatgcctctccagcctctggagcttccatgtatgatctgttcctgcttggacatggggtagggcatcccttccacctctgaactcatcacctctcatcttccaagggactctgcttccgcggacaccctctctcctgtcccagcggtttctcccaggtattggatcactcccttcagcttacatacctgctcggccatcgctcagcccaacaccatggccctctgcagtttccacctctccttctattctccttctcaccacacgttccaggacactcgtctgtcctcagctaccacccacattctcttcaaccctctcccatgtgtcatcagcccagcaccctccaacactgctctcatccacttcagtcccaggagcaccccttggttcccgtggtaatcttcatagtgggagacctgctgactccacatcttgcttgaaaccctctctcctctgggcttctctgaagacacacacaggtttttcctgctgctctctggctgccccctgtgtcatcctcctttaccagcagacctcagacgatagatgtggcccagaactcagctctctcctgtcctccctgcactcctcttgaaataggcctgaccattcctctagactcagaagatacccaaattcacatccccagccatgactcctctctcctcattgaacgcaggtaagcagctacctgctcggaggggagttgggcggctcatgctcagcatatttgaagaactccagctttcatccagagcgtctgtttctcacccaccttttcaccatctatcctcccagtagttcaaaacacacccaaagcatcacttgcacaccctccctcggcctcacctcacagtctgttcatttgcttggttccctccacttgacctccaagaataccagctgggtttgtcctgtacctccacctcctctgtgttcccctggtccttctgctgcgtcggtcctaactcatctctggcctgtcattcttacttcccaaaagtcctctctctctgcagccaaattcaccttttaaaaaaacaaaacatgagccagattgccactccccacacccactccagtggcttcccactgccagtggaatagattcccaattcttgatttctggctgacaaggccccagctggtctgacccctgttttttgaccgcctctccatggctccagccggcggctttgctgagatctgggatgagtcatccaccagatagttcaggcttccgcccagacgtcagctccagcgtgtgtacatcactgcagacagccactctccatcccattctttgcggttacccagacttcttgtttttctcagcatgtattgtggcctgacttactctggacacattcttgttcgactcctacccagtcacaagtggtcatcctgcccctggcatcttgaattgttttcctagcatctgtcactatctgaaatgatcctgtttgcttatgtgtcttctgcagtaattctaactccaccacagagaggggcttcagggtcttgtctgtctccactttcttgactacctggagctgtgtccatcccatcatcacaatgtcattgcacggtaatatgctgagttagtgaatgagcacacttggatagcatccccaaataggaatagtccaagtggtggcaggggtggggtggcttggtgtatttcgttcgatttgcaaaatgagctccaaggattctgccagttttatatgatataatcttctgaatttttaagtatcttaatgctttgcatattgctttagaaactggttcttaacagagaaccagtgctggtgccccttaagacagagcatgttggtcacagtgtatacagtttatggcagaaaacactggcagcagtctcagcaacaggttcttaaattagtataagtagttagagttgaaactggttttcctccctcggatcatcttagcctgttcctgaatcataagtaaagtcagtggtgtaaattaatagggattatgtagattagatacatttcacaacaatttaatttcttatgtaacttcatttagtccacaagtatttattgaccacttactgtggccacccactgccctggccctgggagtggagcaggaatccaaacggagttcccaggtctctctaggtacaaaagaagaatcgacggataatcactaaggaaacaaattgaaatgtgctttgtcaggtggtgaaaagtaaaatgagggtgagcaggtgcaaggcatacgttcgcattctgaagtcaagtcgtgcatgcatgagtgtgcgaattcctaagcatgttttcaactgagaccatcacagcaatgtatctgttcatcattcattccattcacttgacaaatatataactagcgctttatcgtatgcagtggtgtcccagggtacattgggaagtgaccccagagaagatggacacatcagttgatccaatccaatcaaatgctgccaagaactcagtaggctaaagggagtgtgggatccatgcgaagggaagggtgtgtgcggctatggagctttgttgttgggggggtaagaagggcggacactgaaggcgaagcacagaggaaggaaggagcgttccagcccggtatggaagagtgaggaaaagcattctaaaaaggtttgcccgtgatcctgagccagcagaatgccctgatggatgtggcccagaactcagctctctcccatcctccctgcactcctcttgaaataggcctgagcattcctctagactcaagatacccaagctcatatccccagccatgactgctctcatcatttcctagggaagagaggaatgtgatttgaaaagatccctcttgagtcagcctgggttatcatctgctgtgtagacagctcatgccaggctgcgttaatcgagagcagagtgggctcactgcagacaacccgcgattcccctggttccaggagtccagtagccacgggtagagccgtcactgaaatttgcatctcgttctttggttcctttctcatttgcttggcccagtttttaatcaggtcacttctcatgggcctcaaggcaacaatgtgtcattaacttacattttaggctgggcgtggtggctcacacctgtaatcccagcactttgggaggccgagacgggcggatcacctgaggttgggagtttgagatcagcctgaccaacatggagataccccgtctctgctaaaaatacaaaagtagccaggcatggtggaacatgcctgtaatcccagctactcaggaggctgaggcaggagaatcgcttgaacccacagaggttgcagtgagccgagatcatgccattgcactccagcctgggtaacaagagcgaaactctgtctaaaaaaaaaaaaaattacattttaaaaatttcctagcatacagaagtctaaaattttgtaaaattatttagcattttattaattttttagtccccatgtttgcagctgcaaattttcaatttcagggggacttttttaaagatagaaagcatcttgactatcctagcttcaaattaggaataggtagtacagtataaaaagatttgtcaatttgagaccaacctgggcaacatggagagaccctatctctactaaaaaaaaaattcatttaattagctgggcctagtggtgtgcgtctatagtcccagctacccaagaggcacatatatttgaagatttgtcaaatatatgtgctgcttctccaactggaaataaaactttgtgatgttttgtgttctcaacattagaacgtctgattttataatgtacattttgaagcaatacaggactttttttccacatgactttatacaactcttgggacaggaaaatattcactttgtatttctgtggtttgctcagttccacaacctaggaacccaacaggttaagaaccgtcaatcatactgcctccctggtgactttgtcaactgttagaataacattggtcaaatctttttcatttcctccctcacttccttttgtagattttataaacacatgcaaaaaggcaaagacctaaaggacttaatttttttttttttttttttgacacagagtttcactcgtcacccaggctggagtgcagtggcacgatcttggctcactctgaggttcaagtaattctcctgcctcagcctccctagtagctgggattacagccgcatgccactatgcctggctaatttttgtatttttagtagagacggggtttcgccatgttggccaggctggtcccgaactcctgacctaaggtgatccacctgcctcggcctcccaaagtgctgggattacaggcatgagtcaccatgcctggccacttaaaattttggggggtatcgagaagaaagaaaggcatggaagaaatgagtgttggagaagagtggtgtttaaaatgaacaagttgttacaagatggttataacatggctaggtcgagagacagccagagatgggtgacagagggtggggtgtggctgagcaagcccactgtccagcttctccgttaggatttgtatgttactttggttttgcattcttaaacttctttcaatgaatatatcatgttacatcttggctttattatgtgacagataaggttattaacagaaagtgatattaatattaattatacaatgatactaaaaattttatatcacacagaagcagatggttatttttaatgacttaaaattttactcttttatatgagaagaaacattttaaacatatttagttataaatgctattttaattgctacattatttctgcagcgggatttttaaaatcttactatagttgcagggaaatatttctatgtatatttcagatcctcttaaattatatacttatttacaggaaacaattataattacattgagaaaacagaatggggggcttcaaattatcgataaatacatcacactattctcacacatgatcattccatctggtcatagttcaagaattcagctctagtaggaggcttactctctgagcattcatcaagttaacaaccttaccagttatctttttaggtactctatttttgtaatgtttgtagataaatagtcctttgctggatttttaaatcataactgggtaagcatacgacttaagaattatttcctatgcaaaatagaatcagaaaattccatctacttacaaattctttatgtacttccacattttaagctttccaagttgggaaactcaacttcaaaccagctgttgacccatcctttgttctatatcaagctttgcattaatgcagaaactgaaataagtatctccactccccaaagtgatacatctgaagtcatctggctgactgtgtgtccagaggcaccacgtcagtgtctctttgccagagcctttatgggggtggtacgaggggaactggagtctgggggcacgtcaggccttcatcaatcagaaggcagtggcagcgacagcaagacaggcgggtcaggcccccagatgagatttgtgaggctgcggcatcgattctgaccacacattctggaaaaattatcatcctacaccaccttctgaagcagtcaaggtttgggttattacctggaccagcacccggcttttacataggaccttctcctgggggacggtggtatcgttgtaaaccaaaaggttattgatcaaatcttgctaatccaagttcctgacaattaattttttaaaaaagaaattatttgtccttttaaagaacttttctcttttcctaaaattatgtgaagcttttcatttttaaaattcttttttgtttttttgagacggagtctcgctcttttgcccaggctggagtgcagtggcgcgatctcggctcaatgcaagctccgtctcccaggttcccgccattctcctgcctcagcctcctgagtatctggggctacaggtgcccgccaccgcgcccggctaattttttgtatttttagtagagttgggggggggttcaccgtgttagccaggatggtctcgatctcctgacctcgtgatccacccaccttggcctcccaataaaattatttcattacagaagcatggttaacgcgtgcgctagcagaaaagtcccaccattaaatggaggccacagtgcatggctggagaacagcaggatgttggtatctgttgcacatgtttcagcctgtttctacaaatctgcctttttcttctaacatatgggttaactaccatttctctttgctaattttacaataatatctttgcattttcccctaataaaaaaattaaattttagaaacatttaaaatgcagttaagctttttggtttctaaaaaactcagtcctacacaaagctcttagattcgggagtgggtacctgtatgaatccgttctcacactgctataaataaacacctgagactgggtaatttataaagaaaagaggttttgttgtctcactgttccacaagctgtacaggaaatgtgatgctggcgtctgcttggcttccgggggggtgcctcgggaaacttaccatcatggcagaaggcagagggggagccggcacttcacatggctggcggtggtggtgggggcgatatggggggacttgccgcacacttttaagtgaccagatctcatgagaccaacaccaagagggagctctgcccccatgatccagtcacctcccaccaagccccaccgccagcattggggatgacaattcaacatgagacctgggtggagacacagatccaggcggagacacagatccaaattatgcatttttcccctaattaaaaaaaaaaatacattgtagaaacatttaaaatgcagataagctctttggtttctaaaaaactcagtcctacacaaagctgttaattttgggggtgtatacccttccagtttgtgtgtgtgtggttatgtgtttattcccccaaagtggattggatcataataggctttttttcctttttttttttttttttttgagacagagtcttgttctgtcagccacgctggggtgcagtggtgtgatctcagctcactgcagcctcttcctcccaggttcaagcaatactcctgacctcaggtgatccacctgcctcggcctcccaaagagctggggattccaggcttgagccactgtgcccggccaggccttttccacttaaacatgtaatatgtccactaaaattttccatgtcttagaatattttcatgtacttaacagcatttaaaagaaaataagtataaatagataaaatttcgacactctcagtgtggaaactagaaacaatctcagttcagaaactagaaacaatctctgtgtccagaagtaggggactgggggcccctccaaggagaggctgggcagccattcaagtgctgctttctatgtagtagcttggaaagctggccattgaaatcgccaggcgtcattgttctaagaaccagcagggaggcagcactgtgtggtcccgcccctctgcccagccaggcatatccctgccaccccagtgccttttcacctgctgtgcctgggaacccctccccacccttgtgtccaccaaataccaccttcaccgtgaggcctttctgaccccagtttaaacgtgcccatgtccttcttccccaccttacttctgcgtgccaccagtcaccttctgacagcctttgtcatctactccttcctttccttttttaaaaattatatatagatattttacttaactggttgaaatgtgattccttttttctggtttttattttgatttcagtagttttttggggaacaagtggtttttggttacatggatcagttctttagcgctgatttctgaggttttggtgcacccatcacccgagcagtgtacactgtacccaacgtgtagtcttttatccctcgccaccgcccaccctttcacctgagtcccaaagtccattgtatcactcttacgcctttgcatcctcatagcttagctcccacttatgagtcagagcataccatgtttggttttccattcctgagttacttcacttagaataatggtctccaaatctgcccaggttgctgtaaatgccattattttgttcctttttatggctgactagtattccataattatatatacatatataacattttcttcgtccactcgttgattgatgggcatttgggctggttccgtatttttgcaattgcaaattatgctgctataaacatgcatgtgcaagtgtctttttgtataatgacttattttcctctgggtagatacccagtagtgggactgctggatcaatgttctgatctgtcatctccccccgaccagaatttaagcttcctaaagggagggactgtcttgtttgcctctattctcaaagcctagaacagtgtctccatcagtaggggcacagtcagcctctgttgagtgaattttccaggtatcaggtggtagaatgagcagttgaacgttactgtttgccagtgtctaagccctggattaaatgctttataggtactatttgttaagtctacgctgaagttctctgaggtggtactattatcctcatttttaaatgattaaactgagtcctaaataatttgaataacttgtgcaagagtgtgcaggtgatgaggatccagcgtgcaatgtacggatcaaagcctgagcgttgggctaggccggctaggccaggctccctgtgtgcccacctgaatgcaggtgtccgcatgaaggccgtgtgaatgaagagggcaggggactcatgggaaggtttacctgttttacctgttccatttcagcttttagtaatgaggacatactcatctaaaagtgtgccaggttttctggggttttttttgtttgtttgtttgttttgtcttagagacagggtctcactgtgtcatccaggctggagtgcagtggcacgatctcagctcactgcagactctgcctcctgggctcaagggatcctcccacctcagcctccggagaacctgggaccacaggcatgcgccaccatgcccagctaattttttgtatgtttggtagaaatgggggtttcaccatcgtgccctggctggtcttgaactcctgagcttctgtgttccccccacctccatctcccaaagtctcctggcattatagacgtgagccactgcgcctggcctaaaaatgttttaaataaagttattttaaaatacgaatttcataacgagaacacaaattgagaggtgaacatttgagaatttccatggccgctttggcagtagggatgtttagtttgaaactttaatttaaaaagtgagtgcagtgagtctgtctttgtagcgctagagatgggtcctcagctggccatgatagagaaggatgggcagaggcgggtgtttgagacttggaggggacagtgggggcacagcagccaggcagaggcatgtgtcagggcagagtgagaatgctaggatcctggcccccatcctcccacttgccacacagtcaagaaaatgacaggtgtacgggaagacccaattcaatacagagcagccaggtatcaaatcacagtgctgctctgcagagcctatcccgtgtccagtaaagcagacagcattccagtgttatctggaattatttacaaacgcagtgtccacaatacgatgaatcacaacttacagtttagttagattaagcgaattataatttttaatagtcagtgaatattttcacctgcctagatggggagcaaggctctgaatcctctcttgccccagccccttctccctgggtgaggcaagcatggcatgagcagattggtttttgtaaagtgcctgatgtgcagtcaaatacaggaaggccccttctttcatacatgcacgttgagttccctaaacccaaaatccaaaatccgaagggctccattgagcattgccttttagcgtcatgtcggcactcaaaaattttcagatttcagaacatttcggatttttggattagggatactcaacctgtaatttccatgataattttttttctggaaacacctatgaagttgaattggtaagaagtgctgccataccacttcaaaagagggcggtggccagggggtgctcttcccaaggagctgaaaaataccatgaaattcctgattatgccacctctccgcctgttcttctgcaccgtgtctccggatcatcatcttagtctctttcttcacaactgaacagatctgcttaaatccctcgaacacccaaggctgtgtagatttgccgctttgggcatgcctagcgaattccatttttgtgctcttttgtgcctcttttgcatagtaagcttatgagcgccatgctctttttgctaatatcagttaaaatctttccattttccacttatcctcgtaaaacaaaagcaaaacatgagttggtccagctgcataaacagccttggggctgagctaccccagccacgccgcacccccgagcacgtggaccctgtgctcgtctctgatcaccacagtaccaaaggccagagtcacagctcatgcagaatggaaagttctgccaggaaaaatagactccctcgcctaggcaaaagtatcatggatctagaactagaaaactaactggaatttcgtggaagaaactgcacctgtttcttccttttctgtagccagcgctgggaagtctgggaagacaccaaaaatagcaatgaagcagctccctggagggttgctgggagatgcttgggcacagagagtgaggtgtttgctgggaaaagccatttgggatgggtgaaggtccatgctggagttggagagcgcagaaaatggggtgagtgtaaaagtctagcctgggttacggccccagtgatcctggacaaatttggagtaagaaactcccgccagtctcatggccagagtgcccagggaaagtcttctctcccagtggtgactccgggtttccctagcccagcacaaggacttgggctggtgagctacagaattgcaaagaagagcaggagccagccagccagacctggccatggctgtgccataggatatcacagggtgtgtgggcaggagcaaatgccgggagtatatgcaagagaaaattatggctggtgggaacctgcaggagttgcaggaggagcaaagggatgtactcctgaggtttgggggctggcagcgctgggaagggagggagggaccctgattctggatgagaggtgggtggatagtcactgacgattttaacctcaccccaggggatgaaggctgctgtagggaagaatgaccagagctttctctgctgaatagccagccagccaggattctgcttcctgccgcatccacccctgacccttccagcagccacaggaggtcagggttttgcttaaagaaagagaggaaaatgtcaattattacattttggagcacaatcttacctttcagtttattttaaagcaattttccctaaagatcaaccacagtatgtgactgaactgtattaacgaaattttagcttgataaaggaaatgctttaaactcacagcaaatgtaactcgggatctccaagcacttttttttttttttttttttttttttttttttggctggacagcccaaattccaagacactagtaaaaataatatgataaaactttggtggtgcaaacaaagtcagttcttttttacaaaaagaatattctaatagtatctaatagtaatggtgaattactcatagttttctgctggaagtaaatttaattctagtttttaaatatcattaattctggaggttgcactctgaatgatttcttattttgtggaaaatacgaaataaagaagacacatttggccactgtgatggagctgctttgaaaggctgtgctttagaagacacttccgactttgatctgcagttgcggatgaagatgctcacgagtggaggtgttggtggagatagttatcccaagtagaatactcgatcgatgtccacagcacattcaaattatctttcatgttacaaacttttccagcagttaccagccccaggtacgattatggacaatgctgtcagtcatcgtgagacagagtagcatggaactgaaaaatgtgtagcaggttttcaaacctcttacttgcccaaagcttagtcaaaattatgagatttcctctgaactttgttcttctcgttatttttggaatgattgcagggttggtttaagattgccatgaccacatattaatagttgcactgagaaacaggcgtaaacagaggttgtcccgggaaaggcagaatgaatgtcacccaccctggggaaggtggctcgtgtcactaccctttgctacagctgttgtttctcactgattcattctcgggaatcgcttgttgtctgttggtacaaaataaacatttcctcctatcctggatgactggagccttgggctgcagatgagttacaccacaccagtctcccagtcccatcacacacaggcagtttttacaccagccaaacttagagcttcataaatgcaggaaactgtcaggttcctttcaagaggaagtcttagctacagatttttggtggaaacaaatggtccaccctgatctactcatttaccatctggtttggggaaccttctgtcatcctacctgctatgtatttgtgacctgatatattatttttaaatacagttgtttaatagtgtagtcaaaaatgaaaggtcataagcctcatcttctcattaacaccacaccagattgattccagtattcagtgcacagataacctcatgtttcagcttccttattgacgtgaatgtgctgagcagagctcacctgcctcttgtcagagacatgaatgggctgataatatctagttttcaagcagaggaagttagaggtgaaccgcagcctcagaatctacataaaatatgcagcacagtcattagtcatttgcagtggcccagcaaaatcctaaaacagcaggagagaaaaatattttcttttcagtgtctgtcaaagaagttataacataggttttaaaaaaaaaaatttcatcagccaaatccttaaaatttaaatatgcagacttttttcctgtatttttatcaaaaatgtttatactgttaaaaggttatccaggtaccagataggtgccccaggcagctcatgatgcaaatgtagacaaatatatgttgagtgcccctgtgtctgtaagtcagtctgtatcagtatagaattaggattggattagtgtgaagtgtttgcactgtaaattttatctgtgtttttttttaaaaaaaactggaaatattctgttttgttccactactatttccccagggccttaaacagtgcctccccctgagtggccctgggtagttgttgatcatatctgtaaatatctggagtttccgcacacacagacttcgagtgtgccatcaagatggtgtccctcggtgctgagcctcaccatcctggtggtcctgagcagttgcatcccctccttcagctcagccccagggccttctgttcagggtcactgtggataaattaccagtggaacccaagccctcaaagctgccctatgggctgggcggctccaagagccagagtattgctctgtgacctccagccggttgactggggcaattgttagagccaggtgtggcggaaggacccatacagcctctttcaagtggctgggccttctgtacgaggcacctgacaccacgatgctatcaccatcctcgctgactgggacatgccacccacctccaataaaggcttgggagtcgcaaggatcccttttcataatgaaacttcctgtccacagtttaggagagagtcttgaaatcacctggaacaagaagtttttcaaatattttaggtgtttacaaaatatttctatgaggacagataagggggaatgaattttgcaaattagcatttgatttaacccccaaaaaagtaccccgatggttcccacagttgccttctaacataacaaaaggttacatgtgatggccaagggaaaagaaaacgtaatttatcgttataagatgttaattttttattctccaaaatgttcagactgcaaggatatttcatacagatttgttagctggtatttaaataatattcaacactcctaagccttaaataggcaattagaagtatactgcatttttttccctccagcatttcaaagacattactcaaattttgtttgttctttgtgctgcagtggtcttacttggcaactccctgtcttgacagacttgattacggagcacctattttgtgcatggtgcttgctggccactgagcatctgtaaagaaaattttttccacgcctgtaatctcagtgctttgggaggccaaagcagaaggatcactcaagctaggagtttgagaccagcctgggaggtatagtgagaccccatctctacaaagaaattatcagggcatggtgggtcatacctgtggtccacgctccttgggaggctgaggcaggaggatcgctggagccccaggagttcaaggctgcagtgagctttgatcatgccactgcactccagcctggtgagggtgagacattgtctgaaaaagaaaatgtacttttaaaaatcaggccaggcacagtggcttatgcctgtaatgccaacattttgggaggctgaggcaggcagatcacctgaggtcaggagtttgagaccagcctgaccaacatggagaaaccttgtttcttctattctctactaaaaatacaaaattagccaggcgtggtggcacatgcctgtaatcccagctactcgggaggctgaggcaggagaatcgcttgaacccgggaggcagaagttgcggtgagccgaggtcacgccattgcacccagtgtgtgtgataagagtgaaactctgcctccaaaaaaaaaaaaaaaaatcagagggacacagccacataaaggagacatccacagaagcaatcatagcacactaagggccatgaaaggggtgcagtgtccaagggagctgggaagagaggctgcctcctgtgccactgaagggcaggcttcagccctccaagcgctgctcataggcacggtggtttgtgcagctttcattgtggcaggtctaactgtatttcccaacatcctctctcatcgttctctaactttctccttacaatgcctcatcttttggcggaagtgacttgcatctcgtatgttacggttctgtgttgaggtcctgcgttttaactgtgtgaatgataattgtctggaaaagctgggggccctcgacagccatgtttgcacgttctttaggaacaaggggagcttcagcacaccagcagcctccacaccccgcctctacctgccaaccccttgtgagtccttcaggtttgtccacagcccttgtcatccctcctcgtggtcaatatgcacacatatatatgcttattaactctctccgtttgctggaacctaagctctttagggcaggagctttgtttatttactgctattatcgcagctcctaggagacagcctgaccagggcatgggtctctctgtccctccatgtgtctggatgttgtctagccccacaccaagcacatggtagatgggccacatggcactgcctccccttggtttggcgtggagggtagagttgccttagtcagtctttaactggctcttggccatcttagttgaccaagatggagaagagagcaagagtagggtgaggccggttgagggtagaggttcaggggtgctattttgttcatttcctgtgtgaagaaattgaggctaaaagaaatgacatgcccagggtcacgtggccaggtggctaggctggggctggagctgccttcgagtctgtgcggttccagttcatggagcactgtgcagttttctccctgacctccatctgcttccttcttgtaccctgggtgcgggccatcctgaggagcggggacctctccatcagcacgtgggcagggtgggagctgaagtgtaacaggcatgtcggctccagcgacacacagcttggacatccttacacaccgttggtgggagcagcacagaacttcggctcagcagcatgtatccagagccccacgaatgctcatgttcatgagcctgtgtctcaaaagctgccccaaagtcataatcctaattactgaaaacacacagaagtactgatttatggtcataaatttggaatccttctaagcagctgggaactgactaagcaaaccaaagcatattctgctctttatgatgttaaagaagaaaagaatcctattacttatcttctatgacatataacactcaacccatgggatgatatctcacaaccaaattgcctcttttttaaggctgggcttctgcatatcaggttttcccatagctgaggacaccaacacactttttctaaccacataatgtcagtagataagagcagggatgtacttcgaagcagcggcctgagtttggtgtattgctgtaccttgagcggagtgaagtggccaggtgcattcaggaccctggacaaagcccctcgctgtactggcctaaggagcccaccttccccactcagataggacactttcctgtgcagcagtgggtcatttgactgcatgtgacttttcatagaaacagctaagtttctaaagatgagaaatgtatgtgatcaaagagggctcctacatctaattaccttcctgatttaattgagttttctgcaagacgcattcagtctctccccagcctgctcaccctcacacgtgaaacagaatctcttttcaatttagcagatctgagcacccaacttgagaaatggtagtggctgattatgtaaaaagggaagaggctggggagaagcgggaatctctcaaaatgatttcatttccacctaacagcgctgcgcatcgtgccttcccatttatcggagttcaccgtattaatttaaactttgtgctgcttgcattcagctaaaaatcagctagagaacaatttgatttttgagccttaactataaattcctgatatgcattgcattcccaagcatgctcccttctgtcacactccccacggcttccccaggctttctgcctcacttggccactctgtgttccttctgtcatcccttcaaactggatgatgccattcggcaccagctggccctctggcatgaaaaaaaaaaactgttgtagtggacaagaaaggagagataccaggaaacggatggggtgcaaagaaagtgacaggaaccaagaggagagagcagaggagtatgacctgggaggcgagaacacagagaagcttgagaagcccagggctgtcccacctgtggtcaggaggaggctgggggacaccccttcagggtagggccccatgagcagctcaagactgggacctcctgtgggtcagctgtgtagagccagatcctggtaggtggctggaggccagacagccacgtccatttgttcatccagactcagctcatggcccaagtctcatgatggcctttagcttcagtttctgggggaacccagccaccctcctgtcccctctgaccctctcccccgtctcactagaccgtatagtggacgttttaaaatcttccttatttaattgctttgtagcatttaatacaacgacctctcccattttttttaaacagctttattcagataaaaatcacataacacacttctcccatttaacaggtgcaatgcagtagtttttagtatctcacagatacctgcaaccatcaccacagtcaatctcagaacattttcatcgtctcaaaaaggaaactctgttcttgaattggtggtcagaatatgtacttttttctttgtaaggctttataaacatatttcagtaatcaaggtcctcatctcaatggaagatcaaatttcctaaattcctactgactaggcttaatttagagagatctctgggcgtaattgaaaatggcccaagtaggcaattcttctctcctgtgtgttctcttggttctggctcctcctattgtattcctttcctccccgtttttataactcagtctaacactgtgttgtcttttcctttcgccaacacctgtcatcttcctgggccccctgccgtgtccccgctgcccctctgacattgtgtacctctgtgtgagcggcaaagggaaagggacaataatgccagtctctgaaacatcttcagagatggggaattcaagtcaacctcctcccgctgaaagctcccgtcaaaaggactatgcgaaggggtgaggttttgaacctcacttcacactcaccttttaacagagacccaggatgttgtgatttccttggatggcaaaggtggcctgttctttatttaccggcctacacatctctgtaagcttcagaaagaacagagcccttattaaagatccaaattagctttatatcgttggccgtgtatcaaaggaagtgcgttttaatttacgagttcctacaacgacttcatcttgagttcacagggggcttcagccctcaactgatttcctctcctggcacctacaaatgggcctgtctttgataattttaaattattttaataccaagcaaaaaaggatttttagtcatgtacctgacactgccaaataggtaaattaaggtgtgggtggaagtcagcaggggcagggggccgatacatacgtgcttagcattttcctctctcttttcttttgtctttcttttcctttttttccatatagatgcatgcttcttatgaacatgttttaaagcattttgtatctttaatcaacatgtagaaaatgaacagccaacccttcgggaaccattgcagctctcccagagtgagtgttgcctgctcctagcaaattcgtggcgtgcccctcatcaaactacgtcccctgagggagagtggttggaggtgtttctggagggccctgtactccctgaaatccaggctccagggtcagggaagatctgacccgggagaggattagggccctgctaacggcagcagtaacagcgggagtccttgcagcagggaggcttgcagagatcaagtgcacctacgcccagcacctcccccagcggacacatttagagaccctcgggagcgcgagggatatgagaatcacaagcacagagactcatctcttgaatatcacccgggatatcaaaaacctatcagcacacctggcgaggaccctcaccaaggcgagctccctgcaatggttcatcaaaaattgcccagctaatgatcggctgggcagataatcggaggagagttaattgtaaggttcgatatggcatcttgtcagcagagataagttgtcacgttttccacttgagctgaaactaaatgattgtaaaataagttatgagtgtccttgggcctgtctgccggaatgatagctaagaatacattcctggcccatcagtctcaagcaggctgcttgatatttatgcggacggaatgttattttattccccctctagtcatgcttgtcagctctccgagtgaaaagtgaaactgcttctttgactcatacttcacgttccgaagctcggagagactgcagattgtgatcattattgctcgtattatatattttttggggtgtgcgttgaacattgatgcccgattgggaagaactaatggctgacattgaatgtgcgggatggtgccggcccatcccggctcagcgccgcgcagctcgggaccccagtccctccgtcagagccggtttagatgtggagtaatgaggcgctcgcttttttaatttggcatggcttttttctcttagcctctcccctcccatacttaacgccgtcgacagtagtcgtctgtcccggtgcccggtaattgatacaaaataaaatgcattctttgtatgcagccaggaggagcggatggcgctccgtgggccggctggagctcatttacagtgtctcaggcggggctttcggggcctcttcaatttgaggaataccttgtcaggcgaggggagtagttggaatggaaaagcacagcgtggaagcctagtgcgttgtgattgctcatattttaaaccaggggaatgttaaacaactccttgaaagcgagctctcgacacctagaagccaggggcattcatattcccgtggccgagctcagcgcccagtggacgggaacccggtccttcttgccatgagaacacccagcccaggagaggtcagggcctggcctccaggtgggtcctctctggtcgctcctcactggtcttgagtcccaggtgacacttcctgcccgacttctgtctcctgccacggcccccctcaattcacatcctaattcaccccgccatcaccttctcagcaccatgatggccactccctcgtgtagccggttcccctgctgctgcagccgggccctcccacaggcaagcatctggaactagcaccagagcttcctcctgtcaaagctgtgccactttccccactggctgcctgtccgctcctgccaaacctgctcccacccgccccagcccagagcatgtggcttctctaagggcttgagtgcctcccttttgggccaccgtagacaccccacctctgagtggtcaggcgccactggttgtctccttccagcaagaaagttggagtaaaatgtccagggcctgggctatggagtgttggagcattgccgtggcaggagaacgcagtgggcagagacgcaccctgccctgcctgcagcatggcctggaaagtcactgcctcaactccatgcctccaaatgggggcggggagggtgcttgcggacccaccctggaggacctcggccctgtaagcagcagatcagagcgtgggctggtgctgcttccaggatcacaggtgctttgcacacgtcagttactcgagtcatagcctcctgaggacgactgcaaggagctcatgaatgctggcctggctttctgtttccattcttgagattgcagttgtttttatcccatgacaaccctgtgtcctctgaaaagcttgcctccttctccccgcagtggccaggacaaggctcacatttttctgttctctgtctccccagccctctcctgggctttctcccggtgcaatgacaccttcatctccctgttggtcccattctctggggtggctggaggtggcctgggtatgctcggtccagtgcaggtgggcgtgcggactcttccgtacctcacttctccctgcacctgtggcccctgctatcggcgtgcttactggagatgcgattcccctcttccttctttgttcaggtagcagggcccaagaaaaatcgtcttttatggaaggcatcaagcaagaaatttgataggcattctcttcactctagaaatcagccccgtgggacaggggtcttgccctttattctctgacagcggccagctcctagggcacgcttggtgcgtggggacactcaacagggagatgctttctctgtgtcaatagacttcactcatggactcagtcgttcgcctaaaaatagattccaaatggttggaaactcataggacagtggtttggcacaaaagcgtgcttgtggctggttttaaaactaagtcgcgaaattgatacactgctgtgtgatacaccagaaagtggtccgttccatccacccgcgcaagtgtctgtcacacagaggttagttctttcataaaactttattacgtatcgaaccccattactcatcctgaatctgtttcaggaaggatgtgtgctggtgaagaggatgagcgaaggcctgccttcctgaagctcgagcgctcatagggaagatgttccgtaaacaaagaaacacgcatggagcatgtcatgtccccatgtggagagagccacggagcacagggggccgggaggggctggatgcgccagtggccagcttggggaaggcctctcttggggcttcctcctttggctcctggagtctaaaacttcctggtgtcccttctgcctgcctagcagaacccctccacacggctccccgtctaaggcggcagggatgagctgtgtggatgctgctgagactggtgtgactgctttgagccttgtccactgatgcagcacctgcagggtgccgccggccccagcaaggacacaccagtggttggtgggatgtgagcgggactggagtgaggccagccgtggacagcagtgcagagggacaggccctagggagttgtgctttaaagaagggcaggagtcaaatgtccagggtggaggtgtgcggccaagggagagttgtgttaaaaatgtgagatgacagggccgggcgtggtggctcatgcctataatcccagcactttgggaggccaaggcggatggatcatgaggtcaagagatcgagaccatcctggccaacatgttgaaacccgtctctactaaaaatacgaaaattagctgggcgtggtgcaggagaatctcttgaacccaggaggcagaggtggcagtgagccgagatcacgccactgcactacagcctggtgacagagcaagacttcgtcacacacacgcacaaaaaagtgagatgacagctcatgtttagtgccgggtgctgggtgagcgagggtgggtgagcatccatttcccaggggaggggccccgcgcccatggagactgctggggacaggctggggcagggcggggtggagggtgtcctcttctgatggatgcttttggtttttggttttgttttgttttgttttgttttgttttgttttgtttcagtgaagtgaaaagtgaggtcatcgtgaggatggtgtggggcgtggggtgtttgaagcgggaggagaagctttgaaatagccccttggagagtgggaagtgggttactacagaagtgaggtaggattgaagggcaggccagaggccactgaggggtacactgaccacacagaggaggccggtgtgcatggcaccaccctctcccagccctggcccatgacggtgctgagcaggtggagggctggaagtcagtgaagttggggcttcctactcaggagagatggtgggagaagggaaacttacaagggtgagtttcaagtcgtgtgcgatgctgcccggctgtataagaaaaaccgtgggatgtgagcgggttggacgtcagatggcatggaactcagggcatagaggagccacgggagtgaaggcctagtgagctggggaggcaggggtgggggtggcagttagaccctagaaactgtggttcttgctggtagcaagcctgggtgagaccatgagagagggtgtctgaggtccagggcagaagagattcatgagggtggagtggcacagaggccagggtgctggagaggacacccaggaggctgagatgcagacagaccaaaattccaaaggaggtgtgtgcgagaggttgaaaactagaagctctggttgaaattccatggggtttctcgctattgatattttaggtatttgagactgttctttgtggcaggggctgtcctgtgcattgtagggcatttttcagcacctctggcttctaccatctgatgcctgtagcacctccactccacccagtttgatacccagaaacgtctccagccattgccagaggtcctgggtgggggttcctggagaaccggtggatctgtgggaatccagagtcccatggggctagaagtgctcgtgtggaaggacacaaaaggaaaacgtggatgtggaggaaatgctgatgggttggctgtggtggtctcttagaggaaggtgggtggtggtatttccaagtgctgtctccttcccaagactgccacttagctgcttcctccaggtgagtccgggatttctcggactcaccaagagaattataaatattgcaagatatggagaaagcttagaaatgagagggccctgtccctgtcaactgttttgcaaaaagttttctacagctaaaagtgggaaggggcctagaaacagacgtgccattttgatttccagaaacgtgaattctgagctagatgccagtgagtcaggtcacaaccaggtgggattctgaattcagttgttaaagggctgctttgtgtgcacatagaaaaggaaacagatgtatttgaacagaggtagtttattaaagagaatgaatagacatcaaatagatggccctttatcgttttcagttgtcaaaaatacgtgtgagttgggtaccatatagccctcagcagagtatttgacaagatttttccttggtttcctcataggcaagttgaaagatatgtgagctgaacacaaagacagtgtaatttatctaggctcagtggtcactcttagaatcttccaggagcggatggtgcatgttaaggtgggaagctctatcttgactccaccctgttcaccatctttttcattgatgtggatggatatatgggagtatatgctcagaacggtcaagcataactaaggcgatagtgaagagtaacaacacataggcttagaacacagagacatagagtggtggcctggaatagagagcctagcggtagacctaccacgcccctgtggaagcctgtcgtgtggacggcatagctaatgtgtgtgttctgagtgtcttcgaaatagcggtgtacactcataaaaacaaccgctggataacggaagagagtttatgatataatgcacctactgtaggctcagcattgcacaagtcaccacaggggaggcgagcactggtggttgccctgggcacaggcatgctagttagattgagataagcgactggcagcctcgtgcagaaggtcctaactgtgggctccgtgggagtgtagagatgagaaatgttagtttgggagagagtgttacaaacacagagtgacagagggaaggacgcacagttggggatgaacatggcctgtcgaaatgagaggacacccaagggacagagtaaaataatatgattttaatataataatattacttaatagcggcccctggcagccgaggagagttgcgtttgcctgttctgcttatctccctgcaggactagggttgagctctctgagggcaaagacagtcacagtgaccattgtttcccatggcctggcaccatacctggcaaagtgggctcctaacactgaatagagaggatgggatggtaaagacttgggaaccctgggcagaaaatatttaaaatgagcaaaaagattgcctgcctggtttgagcattgaataacacagagaagggttgctttagaatcaggtaatgatcttggggtctctggatgccccaccccctgaacgttatgaggcttctgaacactgttaaatcataaataaaaattaattaggctcgcccttttttttccaagatatctatagcttttatctgatattcagtggaatctagtatttcagaaatacatataagaaccactactttagaaatatcagtattgtaaaatcatgggacagcttaaaaggtgaaagtctgggaggagaaggacctcgtggagctggccgcacagtctaggcttgggggtaaggtaagaactggaccaggggtacgtggtgcttaaatggagagcaggcagtcatggagcggctttgtgaaaacaggctgagctcgaggtcccaggctgctcaaggcaagggaagtgtcttatttaaacctgcccgctcccacctctgcagttccaccacaaccaaactgtcatagtgcaggctcagggggtctcaggactgctggctacacctcgggtacagttaaccaaggaggtttaccagatgtccaccgtggaaagcaagtgttgggcagaagtggcagggaagtggcagtttcaagggtgaagcccaaggtgatagcagagaaagctgcccggaatgcaaaggtcagagtgagtgctgtttcttgggagccggctgccgggaagagagggtcaggtagagccaagcctggaactggtgttggtgtcatgcacatggagaatgcccctgtggacgtagggaggagaggcaggaaaacatggcatcttgggccagcacagttagcatgataagggaaaggaagtcttacgggggcgaaggaaggcacagtgaaacagtgtgccgttttgaagaagcaatggtgaaggaagccagacttcaaggagtcaggaagaaacacagtggatttaaaccctctatctggataggaaccttgtctggagaggtctgcagcggttttgagcagacctgaccgagctctgtgacttcagcaagttacttaaccttcccctgtgccttggttttctaatctgtaaagtggaggtggtagggataccacgtgcctcagcggattgcttaagagtcctgaacgcattgctgaaggtagagcctggaatagcccctgttgggtagtaactttggatgagtgtttgctgttgagactgtggcttcaagggttaaggaaataaccctttaaggaataatggggtttaggaaagtgggcatgaaagatcttgggacctctgaggacagaagtgacgcagtggagagggaggaatgagtggaagtgacctggccaagacacctgaggatgaaagatgggaccaggacaagctaggaatgttcatttagcaagagaggggagcccattcctctagggatggagagaggggagtccgttcctctggggatggagagagggagccctttcctctggggatggaggagaggggagccttttcctctggggatggaggagaggggagcccgttcctctggggatggaggagaggggagcccgttcctctggggatggaggagaggggagccctttcctctggggatggaggagaggggagctcgttcctctggggatggaggagaggggagtctgttcctctaaggatggaggagaggggagcccatttctctagggatggagagaggggagtccgttcctctggggatggaggagaggggggcctgttcctctggggatggagaagaggggggcctgttcctctggggatggagagaggggagcctgttcctctaaggatggaggagagggcgagaaggccagtagaggagccgtgatggtggagtcacaacagaggcaccccaggaagctgacagccagatttctgccattgatgttacctctcacctaccaccaggggacagtgacctgtccgtgtgcctctgcatctaaggatgtgcgtccataggaagcacctcctgcctggtagagggaaagttgctgagacaccgaattgccacatttctcgcaactccttaaagtggtgaagggaacttccgccttttgtgagtgagtgaccacccacaaggagtgcacatggttgacacagtctcaggtgtctcatggtgtccagtgctgcctgggctgccctgcaggagccctggggtggcccttcaccctcttcgcaggaggagctccccacagccctcttcttccatgtgtaaagggtgcatgcaatgaagggtgacgcttccgactgtgcagagaggggcgaggggtctctgccttagggcggccaggaacgtacatcagggtgttcttgggaccgtatgtatttctcagataccttaaattgtgtgtttgtacatttctcaacatatgataaaatttcctagaacttcacaaaataaaaatattttcaattcattttgatttccattatctttgtatttgaaatcatgtcactgttctgctcagaaccctgcatggctccccattccccccaaagcacaggcgagggtcctcacggtggcccgcaagccccctcctctccagtgccaccttccgcaggcctctcccacccacaccggccaccgccactcgggccccctctccgtttctggaacacaccaggctccctccttggagccaggctctgactgtttctctgctctcattaccttctcactcctctgccattttcaagtcttgattcagtgtcccgtgctcagcgagacctaccccagctaccctattttaaatgacaccccccatcactgccgcctctccccagcctcccagccttgatgccccgcgttcctattcggtctttcccataactcttaccagcttctgatggactccaggttctggcccggctgccatgtcactgccactccactttacagagtccccattggggcaggaatgtttatctgtttctcctcgatcaatgatggctgccaagcatcttgaaaagccgctggctcacagtcagtgctcaaaaaataccagctgaatgagtgcggtgtgctgtacagaactctgactttggacttaaagatgctgaatcgtgaaataaaaacttttcaagacgccgtaggcatgcaccacctgtttttcctgcacgttttcagtgggcttttttccacccggcttgaattatatgcgcgttctggtcatgtagtaccgctttggccttctctttgataaagatacaaatggacataatacattgagagtttcacttatagtgaataatcacgtgtgcactggttttgaaactgttctaagtagcttcaatgaatcaaaaattggcaggcctactatatcgacttccaaacactgtcactggacattggtgagagagagaaaaaaatggcatagaatttttcactgataataaaacaagatgaagttatagtcatctgtaatattgaggccggaagaaaggatcaggaatcccttatcctgtgcacccacaggagtcaaacccacttaagatgatatttccaaatgtattcttaaatgcatcgttttcatttctaatatatcaaggtaattttaagaagagaaagataactaaaaagcataaactcacccctttccttttgcagagctccagtcatgcagaggagagaaggagaatgcatccatagcatgctgctgatagaaaaagaaatgcttgtgttttaatagcgggaggcacagtagagcaagggggactgagcccatctcataccagaggctctaggcctccaactcagcaatacagtaatgggatgttatttgcagggcctgtgtggtatgagaggagcgtggctgtgctgtttctgcgcattctgctttgtaagtgctcactctgcatttttttttttttttttgccttttccggtccaatggcagacacagggctgggtgactccgtatgctccagccccagtatctccagcaccaccagccccaagctcgacccgcccccctcccctcacgccaacagaaagaagcaccgaaggaagaaaagcactagcaacttcaaagccgacggcctgtccggcactgctgaaggtaagggttccgcggtgccccgggagagagtctccactgcggaaaattctctgttatttttcaaatgcgtgaaattagacacccttagcacaacaaatgcacagtaatgctggtcaccgtatgtgctttctgtttgcaaggtggcacgagagggcccttgggaccttttcatcactgtctgattctcatattacgcaaccaaatctgctgtcatcactcttggccgccgtcgctggtagcgggtaggagtgctggtctcccagccaccagcctgatccagttctgaggtctcgccccaccctggcagcctgggcgagtgtcctctccagccaaggtgggccatgctgcgtgactctgctggggacagtgcccacttctagtttaggaatcatctctgatattggttactcttaactaaccagacacctgccttgatttcagcttttagcaacgtgttatgataaacacttcttctgttaatgtccatcagctctttctggtatgtgggctctattaatattccagttgtcacagctcattgtgagtctcctttcacctgagtgcttccttagtttttattgccactgatggctggatgtcagcttcctgaagtggctccttcaaatgaattccctttttttttttaattcatagatgcaagtagagataggtaagcgcatgcgtacacacacacatacacacacaccccccacattatgagaggtaaaattaatgcagttgtaacaaaggaatacttaaaaggaaaaattaaagtttgagaaccttgttgttagaacatgaattattacctgtgagaccgacaatggtgagagagtgtggttacctgtgagaccgacatggtaaaagcgtgtcttcagtgagggtctcatgcccaggggcaacatttatggcttccatcctttctctttctctatggctgccatgctttttccagatactctacttgatcgagggttcaaacctgcgagctgtcagacagtggctacattagagggagtggcccatcccgtccacatatccagagcggagcacgcaaacccacggtgcgtgtgttagcagggaaggggcagagtgtggggtgtgctgtgtgtttccataacaccggaggcagggagcatcatttctttcatcatcaggaagctgaagttcggagctctgagtagcccgccagcctccgcagaagggttagaagcctttctccttcaccacgtttcttcctgttttgcctcctgtaagcttcctgctaacatatttagccaataaaaactgatttttcgtcgggcacggtggctcacgcctgtaatcccagcactttgggaggccaaggcaggaagatcacctgacgtcaggagtttgagaccagcctggccaacatgatgaaactctgtctctactaaaaatacaaaaattagctggatgtggtggcacatgcctgtaatcccagctacctgagaggctgaggcaggagcattgattgaacccaggaggtggaggttgcagtgaaccgagaccatgccactgcactccagcctgggcgggcgacagagtgagactctgtctttaaaaaaaaaaaaaaaaaaaaaagacgatttttctcatgttgtggggagtgaggataatcccattaagtcagcgatggtggaaaataatggttatgggtcagagcagccacagatgccactgaccttcccactgaaaacagtatcagccgcaggcgctctgtgttggtaagactccttcagacaaccgttgggcaaaaatcaccctgccaagcacgtgcagccacccctccctgattgggaagaaggttagcctcccccagggtgggcagcctgtaccctccacgcccctaaggtgcacacacaggggcgggcgccagattccctttaaggacaggccttgttctcactttcacaggcacgcgtcttcttgcatttgttgtgtgtttccaaccgaggtctgtggttttttcttatgcacaacctggtgggaactgaccgttgccacttagatacacgttcattatcccacccacgtgttgaccgctgtgtaaatgagtgaataaatcagtagcgtttctgcacatttgatggagcagctggcaccacccagtgttccattcagcaccggtgagtttgaaggaagtttgacaagtgaccgtgaccacgttggacgcctgatgtttcaggtccacttgctgagtgagtgggatggtatgtgtgtgcgaggcaatagtggatacccaggctgagacacgggctctgtccaagcagcaaatgggggcccctttccttaaagggtcttactgctgaggtggtaacaccagcagaaagatttcaggcaccatggaaactccaatattaggaaatcacaggtgtctcaaacatggatgtgtaagcgggtgacgtgtgtttggaagtccaaggcagaggttccaagggagccacctcactctctaattaggagagtctggtctctacgtcagcggctatgacatctttccaatagcaaataagtcataagttatttataaaaagaaaatgtatcatttttccctaggaaaagttacttatcagactacaaatgagtcacttttgtgaaaaagtctatatttcattttttcaaagccacattttccccccaaattgtaacatatctgaagtcagaacatatcattgtagattcagtgatatatgatatttttgatagttttatttactgttaattccttgaaagtacattgtgtaaaacacccaaattaaacattctgttctggccgggcacagtggctcacgcctgttatcccagcactttgggaggctgaggcgggcggatcacgaggtcaggagatcgagaccatcctggctaacacaatgaaaccccgtctctactaaaaatacaaaaattagctgggcatggtggcaggtcccagctacttgggaggctgaggcaggagaatggcgtgaacccaggaggtggagcttgcagtgagccgggatggcgccactgcgctccagcctgggcgacagagtgagactccgtctcaaaaaaaaaaaaaatctgttcttgaaactaaagctagttatatatgttttattttatttatttatttatttatttatttatttatttatttatttattgtattttttgagacaggtcctcgctctgtcacccaggctggggtgtagtggtgcagtcacggctcactgcagcctcgaactcccaggttcaagtgatcttcccacctcagcctcccaagtagctgggaccacaggcaggcaccacgacacctggctaattttttgtatttttgtagaaatggagtttcactcttttgcccaggctggtcttgaactcctgggctcaagcaatcctcccacctcagcctcccagtgctgggactacaggcgtgagccaccacacccggcctatattttatgttttgagaatactattctattataaaaaaccatttctgcctctctttcctgcaaggctctgtgactggttactactagtgtattctctatcgcctgaccaagtgctgaaaagatggaattacagatataaaacttctatagaagatttgtgtaaagtagttgaattttatggtttttaatataccctattggaacaaataactaggttcaaatctctttagagtataagaaaaatagaattccattgaagtaagcaaatttatcagggtcctttgaatccattggtcagtagaatccattaaactcagctgatgaatctggaatgggatggggctccccggctggttcgccgaggagtcttcctgggcctgtctgcagagatgcggggagaaagtgggtttggtgtagaacccggggtgtaacggggtgaggagagggcaactatttgggaaagcttccagctaggagctgtggccttcaagaaagagacctgtccggctgtggtgaccgggaaggtgagggtgtcctcactcttctccctcccactggtctccagtggcccctccttggccaaatccaaccagaggccaaaagccctgagagcccacgatgccagtcacacagttggctcccaggaccaagacaaaaccaacagaagccgtagagtgttcgtgcctttcacagcacctcctacaagcccctgaagcccgtgccatgccactctgttggtggtccacaaacacaggaaacgaagctctagagggcaggggtatgtgctcccctccatcatcccccagggtctggctttagcctggcccagggagccctcgcggcttcctgaacagacctcagtgcccttccccagctgtgtgcgacaaggaccctgcgagaaggtcttcctagactcccagctaagcacagaggttctcactctggccgtttcttacctctgtggcgcacttattcagaaagtaaaggctaatagtaggaatcatcagtacctgctgctgcaaacccagaaacactgtgtctacacggggctgtcagggtgaccgatggaaattgggccgttcctgccctggagtttctccctgcgcaggtgctcgctgtgctctttttgctgaagaacagccactttgttctgcaccagatggcagagggtgtcagaccccagcccagggagagcatttattttcttaggtttaccatttaaaatgaatcggaggaatctggaaagttacagaagcagggacggtgactggagaatcccttatctttttgtgtatattttgggttctgaggattaccaggagatgtgtggatgacagagcccgtcgctaggctcttatgtcacagatgggctgctgtgctgcgtggtcattgagaccaatggaaggaaattgagatgtgactgggcaggatggtgacagggcctgaagcctatgcatggagggaacgtgcagtgaccagagagaagggtggtgatgaggatgagggccatgaggcatggtgactgtgaccagctgatggaaggtttgcaaagaagggcgtcccaacttgtcctggatggcccaggtggtaaccatgggacctgatgggtggaagcctcaaggaggtggattttgattctgatattaaaagctctagaaaaagctctacgaaccagggccacctgagagggagtgaccccgaccctgcatggggtcggcatgggttggaccagggcagaggaacctgggctctagaaggtgattgcaccacggccctggattcccaaccaggtccaagttcaagggtatgtgccagggaaaagcgcctgggcagtgggattttgcagatctttaatggcttgtcagctcttggcattgtctttgaattacagtactttctgggcatcttcatatctcgggtccagtagtgaggttgtcattgctaaaatgaacggtctctgcagtcccattctgtggccccgaacctggtggttctcgttagttttataacattcatgcaagtttgcattaagtgctaatttccctgtttccccagtgaaaaggctgaagtagagagaggttaagtggctttcttgtccagggtcaggttgctggtaggtgacagaactgtctcttgattctctgcctcaaactctttccaccaggcaaaaagcaagtctttgaggtatgtggagctgcttttgaatctgggagtggggcacactgaatagcttccttgatatttctcagattccatgtaaagacactgacttttatatggctcataacatctagaagttgtgtagcaaagatctttctttaaaaatgcaggaccagactggatttacccaatcttattatacaagagggtatgcagaaatcctggtgttatcccccccttgggttcacagcgctttgttctgaaggtctcagaagggaatttattttatccttctcatcttgttcctttggttgttcattctggtctttatcgcaccattgtgtggttgatcctggatggatattgaaagattctcctgtagagggtaagtcacaaacgggcctctcactgttatggtagaaaatgaattgctcatcacagctgcactcactgagcaatgaaatgttgacaaatttcattaactccagagttgcagaggtcacccaggacttagtttcccttcactctttcaaaggagaacctgaaattgtagatcattttattctttcatcaaatatgaagcaaccaccacagggaaagcactgtgtgcttgcctccatgggagacgttgagaaataaaactcggttcctctctctctccaaggagtttagagcctgattatggagataagacatgcaagaaactgtaacgaggatgtcaggcagaatattcgagaaaggcatgggaattcagaagaagcacaaatacacactgagttgtaaaagttagggaaggctaacctgttgtagagcttaatttttattgtgcagatttagcacataatggttatcttatttaataaaactgcagaaatcattactttttcattaaatgttgcctacttacaactttaaacaccagtggtggtgatttaattagtcacaaaatggagttttgtttttacttagatgctaagaaacagatgttgctattgatcagttaccttttacctgaggacttttttttattattattaattagttgatgtcttggaaggcactttggagagaaattaaagaatcgtgcatgcatatcgtacagtgttgttttttttcttgcaggaaagcaatacgtgggtgcgtggaagctctcagttaatctgtaaccatccggttagatggactatcatgcagcttgagccattgctgggtagtttggggattttgcatgccgtgattgggagggcagtgtgcttgttttgttatttagaatataacaaggttgtaagagtcttattagcacaaggctctcatcttttctcactcctggggtgcaattagtgtgcacatgacggtgagcacatgactggcaaggagtcagggcccagaaactgttaccttccaggtttatatccagtctacaggggctttcacattgaattctgtgttatttggaggtggctggaggggagatccagttgcacaagtgttactgtcattcttccctcaggttttctccttttcttctccatgaacattccaccggcacctcccgtgtctgctccttgtttaacattggcagctacccaggaaagggaacgagaagtctccacaatcagctccctaaaaactgcataatcaacagtaatttttgatacaataaggacttattaattaaacttccttattagcaaaccactggttagtgcatctgaacagttgagttgaacagttcattatagcaaatgtggaaaaccaagaatgagaacatcttcctgggagatacactggaaatgcagtagcgaatgtggaaaaccaagaatcagaacatcttcctgggagatacgctggaaatgcagtcacttcactctgctaaggatatcaggagactggctgggtttcatcacccttgggctgtcagtgatgggagccaccatgcatcccgacggacttgcctcctccccacaaactagatgacttttccaaagacagtttgctctcaggttgtaactccagcttccaagagaatgaacttgctgaaattgagtagatcatctgggtttactctagacattgacattgtagattgggcacagttgactcaaaagccatcctgcagggtacagtccggccgccacaaacacacacaagcagtaagcgctctcagatcctttgtggaagccagcaggtcggaaataaacaaagatgagtcgatcacagcaggggcagccagaacggaagattcccatcgtgatgaaccgacgcacagaaggatgtttgtagtgtggtttttgtttgtttgtttgttttaatttttttaaccacacacaaacttaaaggggttagattcaggtccaaaaatgttcattgagcacctactgcacgcaagagttttgtctgatgctggatgggacatcaactgaagcggcccagccatcaggacacacatagaccagtggagaaagcagaaacacgccggggaacttggttatgcaggagcacagggcacccccagctgcctggaggacctcagggaggttccccaaaggggagtagacactcacacacgttgtatagacaacgaaatatctgctattccaaggaggaaaaaaggaaaaaatctgaaaagtcaaaacaaactaaatcttgtaaagaggtggcttggagctcctgggggtacctaggcaactcctgacgccacagacaagcatttgagctccttagcctgctacacagaagcataaactcacctttgaaaaatgctgactactcacaaggtccctttctaagatacagaaatgtgacggacctcaactccttttttttagctagacttagagattctcttctgcgagtggggctcggttagcacaagctgctcacaggctccggcgtccatcagcagagaactcggggcaccgtgttttcctgtgtgcaccctgggattggaattcgggctagcttgggagaccctgcattggtcgactttcattagaatctaggatctgtcttgaagtcattttcttgatggtctcaaaatgtttgagctctgaggcttttcggatgtcatttaagtctcggtgaaattatggtccacttggaccaaggtcctgaagccagaagaggggctggttctagcggccagtgctgttcaacttgtgtcttccttactattctaaatcctcatctactctttctactttcctcagctgcatgtattttacacacaaagtacagggatacagattgaaatgttcagcagcaaggtatgagaggtccgcatctcatgcacgagggtgtttttctcggcctctgcagccctcagatgttcccacgctctgttagacacatgcggcctgggcttcaggaagtagagatgcccgggggttatattttcagatgttctagctgagctcgctttgtctttcctcccaggcctggcaataatgaaactaggcagtgttttatctcacaggcagtggcgacttcattcctctttctaaagatgtaaaacaaaaggggatattgactaatgcaaaacttagtctgtgtggaagcaacttggcaaatggggaggatgaaataaaattgcacctaccgtttgtcttagctcagcctgccatatcaaaatgccacagactgggggcttaaccagcagaaactcatttatcatggttctgaaggctgcaaagtccaagatcacggcaccagctgattctcttcctagggagagctctcttcctggcttgcaggtggcccttttcttgctgtgtcctcatgtggcccttctgtggtgtgcacacacacacagagagagaagctcttctttttcttataagaacacccctcccatcatgaaggcccagccctcatggcctcatctaaccctcatcacctcccaaaggcccagtctccaaataccagcacattggtggggtgaggaattagagctacaacatgtgaattttggagggagacaaacattcagtctgtaggaccattctactttctattcctggctgtgggattaatgtccctgtggcccccacccacccactcacccacgcaccatatgccatttaaggatttcatggactgtctcaggtcagaaactgcttggacagatcacagctgtcctttccccttcactcttccctcccaagtcttggatttgttgtcaggagacatcatccagtgcaaaggaagaacaccatggatttactgcctgcttgtgcgctacctcattgcatccttaaaacaaccctgtgtggtgttggcaggtgggtggtggcatttctgttgtcacaaatgaggaagagggttgaataaagttgagtaatttgcccaaggccagtagatgagtggcctctgggacttggaagtctgtattttgctttgcatttcatctgttaacctggaaaaggcttcagggggttggagtgggaggagagccttctgcaggcctcttactctcaatcctgtggctctcagagttgcttctccctctgtgcatgtccatttctgcagcacagcagggccatgcccacggctccccaccactgcccttgagaactgggaagcagtcattcctttgctggttttctcaggaggcctgttgtgttgtggtatggcttccttgcaaacaagtgcatgcacactctgatacgtttttaaaaaaaaaagatgcaaatcactgcttcagctgctttgcagacagttagaacctacaggattagatgggctctgttataaggggacatctctcttgaaatttttttggacttacggacatttaattcagatgcagtgaacccagtttttctgttcattttaagattgatatgctttttctttttttggatgacagaagtgtatttgtggggtttttttgttgttgtttttgtttttttttttttgggatatgatctcactgtgttgtccgggctagtctcaaatccctggtctcaagagatcctcccatgtcagcttcctgagttgctgggatttacaagcatgtatcaccacagccagctagagtgcacatttttaagggcagtttgaggttggagggaggagggtggtgattgattaagcccccctgtcgttcatttgaatcctgcatcgctgatttaagtgttaatcaaatgcctgtctcgcctggctgcggggtccgatcatagttactgactcgcgctcattttatcaagatgtattaatgctttggagaaggtgtagttgagataaactttgtgtgtttatttagtaatctttgctaataccctcctggctttccactccacccctttctcatctcagacataccataggcaccaaggtgtggagccagtgaaagaacaggcgcagcgaacgttccggcaggcattgccgtgcacggacacacaacttcacaagggcctcttgtgcacgtgggacatggagaaaattggccatttgtctgtggggtaatgggctttgctgcaatatgaaaatctatcaaatgggtaaaatcaatgacattgtatcagagttcatgaaaagtgcctactgcacacagtttaattctatttaatttttttaagtggaaaaaagcaaaggaaaaatgttttagttttctcttaagctgatttcgctctgctttttcttaaaagtgcctttctagttgccacacagtgatgtgatcattatctgccacctcgtcgccttgctgcctctgcatgcagtaaaatacaaaaaaaagagagatagagaaagcaggggagcttgtgaagtatgactccctatcccaagactcattgcctgcgattcgtaccgcttgacagtaatgatcttattacagtactgtggaccttgaagagatttcatgaggagagtgaaaggacgaccctccgtgtaatcaagtggcgctgaatattccacgcgtttttgatcacacactgattgggcacagttttagcccatcttctagtcaattatgcatggcccctgtgctcctcgaatagtcggaaacattgatggctgttgtctgggttttggcaggcagccaggggtttgaagtgccttgtacatcgtcatcccaggataagtgctttttagttggaattgattacctttctttgggttttgcttaatagcaaaactgcatttggagagggcttcaggtgaaaaatggacatattagccattgagagcatccgaactcctagtcaatttttaggcttcccttgtttccgtctaatttctgtttaatgatacagtgtttgataatatttaagatatctcaccgcatttgccgctgagcacacatgttgagcgtcgaggacaggttcaattatgtggccactgtgttcaggttcccggattgatccgggggaggctctaagctttgaggagatctggcggttagtttccatcttggcataaaagcattaattatctaaagatcttttcatctgcaggaaaataggcagagaattcttcctactgttgagtggtcgctccgtgtgaccgtggagctcatgtcagcattgctaggtttgggctcagcctgctaccctgtgcccaaaagactttctcccattgtttcctccctcccctcgctattgagcttgaagtctggggacatttgaaaggatgggattgtttcttaccaaaatgaggcatgatgttgcctcttaagaaaatcagacaattaaaccaatgttactatgtagaagtgaaaactggtataaaccaagattttttgcctcctcctgttatgctcttaattctgattcttgtcttacggattgtcttagaatgattaggaaaacttctaaggtgttttatttttttgttttaacattttgtgcaaggctaaggaattagacaccccagagtatgtgatcactgtgagatgtttctcaaagtctgtcttgaacttgccaacacatgctgcctcggggcctgtggtcactaagcttatatgagggacgagagccgtagcattgctccagcaggtatttcaataacttgatttgactcttcttaattaaataaataggtagctttgttctttggcttgattattcatttgggtctttcttgctttcttcaggtaggaatgattttccccttcagttggttttctgcagaagccatgatatactgtaggcatggttaccagaacacccctaagagagctgaccagaatttctaagttcatgttccatgcgtacacacacacacacacacacacacggtgttattttttttctttctgaatttcatgaaaataaaatattttctaccagaatacacatttagtgatgcctctttcaaagaggaaatcaatcacgaaacagaaactcagagttgacaatctattagcaataatatcactatcaattattgaccactgccatgtgtcaggcactgggcttaagtgctttacacgcagcgtctcataaccctcacaagaacctgggaggtgggtgccgttatccgcatttttataactgaggaaaccgagggtcataaagtttaagtaacttgctcaaggccatagacgtagaaagcagcgatagggccaccgatccaggcgagggcagcagtgctcgccgcctctaacacatctccacggtgaccttcccttcccttggaagggggcgcttgtcttttcagcggtcttgcctccgaatcttggcttgtctaggattcttcctacagaagaagttcatataaaataaggggttttattatgggttatctgaagagtgtttcttaattttaataagttaatattccaaccataaaaacttctgacattttacccgaggctgtgcttcagcagattgacagaatgcatttttacagcacttagaaaataccagatccacgaagaacaaatgatcaaagtttcaaaggctgtaattttggaaagctggcatatataatgatgatctcttcgcagcctggtaattttacctggacaagtaaatccatttctcacatttaaagagaatcaaagagtcagtaaacatgcagaaacacttttagctgtgaatgcagagtaactcttacaattaacatataattacctcaacgggccaattaattaagcaatttaagatctataactattttcatgattttcccccaaaatattactttattctgcacaccgtggggacatcagctgggagggtcatagctaggaggtcagaaggaaggggggacgattcatgcaatgaggcactgctgttgtggggtgttggtttgaagaactcataaatggtaaaagtaacctgtattatcattggttctaggggactactgaagataagaattttcaaccttcctcttcgttgtctgctctcccaggctcattgaaggaacatagagaaggtttaggccctgtttcttttcgagcagcacagaaatacttgcccagtccgttcgtggaaggaaagaaccgaagccagcccttggctgccattctttccagacttccaccattgtgccctgagtggttccagaatgtcattgatgggaaattggttttctttccttctggacattcaaagattaatatgttactgtcatcagtgacttgttaccttctgtttctgattgccagctcatcagcttagtttgcccaggagagccactttttcccacgttcttttacttgagttctgagacaagatttgatacccattcatttataggccaaatccagttcttattttaattttttttcccaacccctaaaaagcatttgcaaacactcctccacactgttcagatgagcgatgtgtgagcatgaggagacattccttaagccagcctggtctgtggaggtgtgctcactgctgcagggccatttgctgagcaggaagctggcctcaggggtctcccaggatgctggggctggtggacgaccccagagaagggacaggatggggggttatggaagtgcccagcaaggggagctgcaggagggtctctttacaggtgtgcaaaggaccagcgctgctgcagggaacatggctgggagggcatccaccggggcaggggtctgggcaaggggcttctccccttgctaggccccctccttttgttcagctcctcctctccagcaccaacctcccatcactttctacattctggcccctttttctcctttccttctttctcttccattctcctttttcctgtaagactgtccttgcttctcttgtttaatttcttttttcttcttttcccatccataacctcatcattgtctttttctccctttcttattctcttttttctttgaacttttttttattgtggcaaaatacagtcatgcatcacattacaacattttgttcaatgatggaccaagtaatgtgatggtggtcccatgagattataataccgtgtccttactgtgccttttctatggttagatgtttaaatacacacttcccattgtgttgccactgcctacagtttttgatacagtcacatactgtatgggtttatgccctgggagcaataggctctgcacatagcctgagtgtgtggtagccacaccatctaggcttatgtatggactctgtgatggtcacacaatgacaaaatcgcctaacgacacatttctcagaatgcatcacttaacgatggggatacatggctgtatgtaacataaaatttgccattttaattgtttttaagtgttcaattcagtgccgttgaattatattttcacattcacagtgctggacaaccatgaccgccattcccaaaacattttcttcactccaaacagaaatctgctaaccattaagcaacaactccccagcccctacttctcccagcccctgtgacctccagcctgctttctgtctgtgaatttgcctcatctggatatttcatatcaaaagaatcatatgatagttgaatatggatccttttgtgtctggcatcttatatttggcataatgttccatgttgtagcatgtgtctgtacaccattctttttaaaggatggataatattccatagtgtggatttacaacattttgtttgttgacagacacttggattgtttccgccttttggctgttatgaaggatgctgcgtgaacattgtcacacaagtatctgtttgagtccctgttttcagtttttcctagggtataaacctaggagtggaattgctgggtcatatggtaactctgttcaacttttcaaggaaccaccaaattctttttttttttcctttatttcttaaaaaaaaaaaaaaatagatgcgcagattgtgcaggtttgttacataggtatacatatgccatggtggtttgcggcacctattgacccatttctaagttccttcccctcacccccgacccccaaacaggccctggtgtgtattgttccccgctctgtgtccatgtgttctcgatgttcaattcccacttatgagtgagaacctatggtgtttgactttctgttcctgtgttagttcgccgaggaagatggcttccagcttcatccatgtccttgcaaaggacatgatctcattcctttttatggctgcatagtattccatggtgtatatttagcacattttatttatctagtctgtcattgttggacatttgggtttgttccatgtctttgctattgtaaatagtgctgcaataaacatatgtgtgaatgtgtttttatagcagaatgatttatattcctttgggtatatacctagtaataggattgctgggtcaaatggtatttctggctctagatccttgaggaatcgccatactgtcttccgcaatggttgaactaatttacattcccaccaacagtgtaaaagcattcctatttctccgtagcctcaccagcatcttttgtttcctgactttttaataatcaccattctaactggcatgagatggtatctcactgtggttttgatttgcatttctctgatgatcagtgagttgagcttctttttcatatgtttattggctgcataaatgtcttcttttgagaaatgtctgttcatatcctttgcccactttttgatggggttgtttgtttcttgtaaatttgtttaagttctttgtggattctgggtattagccctttgtcagatggatagactgcaaaatttttctcccattctgtaggttgcctgttcactctgatgatagtttcttttgctttgcagaagctctttagtttaattagatcccatttgtcaattttggcttttgttgcaattgcttttggcatttttgtcatgaagtctttgcccatgtctatgtcctgaatggtattggctaggttttcttctagagtttttatggtttgggttttcatttaactctttaattaatcttgggttaatttttgtaaaaggtgtaaggaaggggtccagtttcagttttctgcatatggctagccagttttccgcatatgactagccagttttcccagcaccatttactgaataggaaatcctttccccattgcttgtttttgtcaggtttgtcaaagatcagttggttatatatgtgtggtggtatttctgaggtctctgttctgctccattggtctatatgcctgttttggtaccagtaccatgctgttttggttactgtagccttgtatatagtttgaagtcatgtagtgtgatgcctccagatttgttctttttgcttaggattgttttggctatacagggtcttctttgattccatatgaaatttaaaatagttttttccaattctgtgatgactgtcaatggtagtttcataggaatagcattgaatctataaattactttgggcagtatggccattttcatgatattgattcttcctatccatgaggatggagtttttttccatatttttgtgtcctctcttatttccttgagcagtggtttgtcgttctccttgcacacgtccttcacatcccttgttagttgtattcccaggtattttattgtctttgtagagattgtgaatgagagttgattcatgatttggctctctgcttgcttattgttggtgtaaaggaatgcttgtgatttttgcacatttattttgtatatcctgagactttgctgaagttgcttatcagttcaaggagtttttaggctgagatgatggggttttctcaatataaaatcatgttgtctgcaaacagagacaatttgatttcctctcttcctatctgcataccctttattttcttctcttgcctgatcgtcctgaccagaaattccattactatgttgaatgggagtggtgagagagagcatccttgtcttgtaccagttttcagaaggaatgcttccagcttttgcacattaaatatgatattgcctgtgggtttgtcataaatagctcttactgttttgagatacattccatgaatacctagtttattgaaagtttttaatatgaagagatgttgaattttattgaaggccttttctgcatctattgatataatgatgtggtttttatctttggttctgtttatgtgatgatttatgtttattgatttgtgtatgttgaaccagccttgcatcccagggatgaagccgacttgatcatggtggataagtgttttgatgtgctgctggactctttttgccagtattttgttgaggatttttgcattgatgttcatcagggatatttgcctgaagttttctttttttgttgtgtctcttcctggttttggtatcaggatgatactggcttcataaaatgagttagggaggaatgtctccttttcaattgtttggaatagtttcaaaaggaatgataccagccctttgtatttctggtagaattcagctgtgaatctggtcctgggctttttattgttatttatttatttatttatttatttatttattggttggtaggctattaattactgcctcagtttcagaatttgttatttgtctattcagggatttgacttcttcctggtttagtcttggtaggatgtatgtgtctagaaatttatccatttcttctagattttctagtttatttgcatagaggtatttatagtattctctgatggtagtttgtatttctgtggggtcagtggtgatatcccttttatcattttttattatgtctgtttgatttttctctcttcttctttattagtttagctaatggtctatctattttgttaatttttttcaaaaaaacagctactggattcattgatttttttcccccccaaaaaaccagctactggattcattgattttttttttttttttttggagggttttcctgtctctactctatcaattcttctctgatcttagttatttcttgtcttctgctagcttttggattagttcgttgttgcctctctagctctttccaatgtgggcatttagtgctataaatttccctctgaacactgttttagcggtatcccagagattctggtaagttatctctttgttctcattggtttcaaataacttcttgatttctgtcttaatttcagtatttacccaagagtcatttaggagcaggttgttcaatttccatgtaactgtgtgagaaccgccaaattcttctcttacatcattctgtgacttcaccttgtcctcatccgttcatgcgtaatacggaattaaagaagctcctgtaattaggctccctcctaattacaaaaataggtgatataaacatgttaaaaatattgttgctttttccagaaaatcaaaccgaaagtatgcagaatgttggtagttaaaactccttttgttattttgtgtttgttcgtttgttctgttttgttttttgaaacaagagtctcactctgttgcccaggctggagtgtggtggcatgatctcggctcactgaagcctccacctccaaagttcaagtgattctcctgcttcagcctcccgagtagatggggttaaaggtgcccaccaccacgcccagctaatttttgtgtttttagtagagacagggcttcaccctgttggccaggctggtcttgaactcctgacttcaggtgatccacctgcctcggcctcccaaagtggtaggattacaggcgtgagccaccgtgcctggcctaaaactccttttgattggtgcgtgggtgacaatggattccctgtccctgctgccatgaatcagtcgcacctgcttcagatactactcagaatttcttgtccttaaatgccacccccaacccccgccccgaagtcaggaagtgatttctgaactttagcgtaagtgttctctggcaggtatggctgtttttctgagcagtaggtacttagtcaaggcatgcaggcgtttctccttgttttagttcatctgcagaggtcagctttttccattgtctctgaaacacttgcatttttcctgtaactttccagtaatgagggggcccagtgggtaaatggaatcttaaagacgagaaatgattatttttttcccgccgactccactctggccaagacgagctctcagattgcacttcagaatcggtgatgcgcactcattcccctgcacccacccttttttctgtggtcagcatgtgtttcccagactgggcgtcactgtcgcctccttgactctcatcactcacatggtcccccagcaggtaacttgcttcagcgccactttgcctgggtgctggtgatcctccagttctcacacacctgcaccttggggtcgttgagttttagtttaggtcttccgaggaatgcacagaccacacgttgtcaggcttcccttggccaataatgtggagtcttttggtttttctgttcttcagagtttgcatcccctgagaattcctctcctgtgtccttcaaataataatgtgagatgaagatgatgatgatggttgttgttatttaaaactgcaagacgtaggcaataccaggtcttaacagcttgttgtctgtggtgtcttccttcttccctggaattagatatttttcgttcaagctgctgacaggtatttattgaccaggtactgtgtagaggtcgctgctgcgtgtggcttcacccagctcctctgcccatctggtgactttgcaagctcacaatgtcctgaatgaaaacctagttcctaagcccttcccccaactggaaccatggagggaggaagaacagaccaggtgaaaacatcaggaggagggtccgcagctcgatggtgatgagtgtaggggagaggtgggtgctgggacaggatgagctgggctggaggagggtttgccctagggaggcagccccaggcagggcctgggcacactggtggcgtagctgaggggctgcctgcgtgcaaggaggacatgaggccacatacaaagcttagggccacccaggaagatgtgggagaaactagaggggattaggagagttcgggctgcaccagctcctgggtgttggttggagaaagagtcatgaatcaaggagcccaggaggacggggaatccctggaggaggtgggtcagtgggaggaggactgaagacattggcaagcatcagtccgtgcgggagacgtgcatggagtggaacggtcacagcagcagctcacagggagggacagcctcggaagaggaaatccatgcgtcttccttttgcccacaggagaagagatgaaagagaggggaggggctggccagtcagcaatctggacagtttagatcattcaaatgcgtagccggggttgggaaccagtggtttaggttaagatcagctagatctgtgtgaaggaccagtgtctcacggagattcagactcataaaaatgtgggccacaccccaggacccacagccacacaagccgttcttatgttgtcccaagtgctctaccgttaggattcctgttaaaaccttttttaatgtttttcctaccctgtcttattggtttaaatcaaattgcagaaaaataaaagctcaaatattatctgttatgtcaaagttactatttgagctgtagatgctgttttcaaaacagatcatcctccttaaagcacccatctctctccactgacatgtgcccctgtgtccagccgcaccttccagcagagttccctgcaaagacgcttccctgcagcctctgtgggtcaggaattagaatgggtgcagctaggaaggcctgtgtctgcctcgtgatgtttggggcctcacctggaagactcagaagccaggactggcaacatcccgaatcccagtcactcgtgtgtttgatggttgatgctgcctgttgggtgggacctaagctggggctgtcagccagaacacctacacatgacctctgcaagtggcctgggcttccttccaacatggtggctgggttccaagggcaggcatcacatgagagaggtacatggctgggcagaagtcttgtttcctctgtgaccttgcctcagaggacacagagtgtcaattttactccatctgtagtcaacacagtcagagtcccacttagggtctagggtagcagaaatagactctgcctctggatagagagtggcaaggttctagaagagcatgtggactaaaatatgaccatggccatttttggaaaatgtaatttgcaacagtaaataagtgaatgtgtattatgtcagattgtgatcaacacaatggaacaagatagagtaagaggaattgggaccaccaggggtggggcaaggttcttttctgcaaaggcagccaagcagggctcaccgaggagaccacatagcacagcccagcaaaggtgaggctgtcgccaggtggccctctgtggtcggcatcttcctggccagggaattgtgtttgcactgttgtggtggccaccttaaactgagtacttgtttgtagttaacatcacgtgctatatgcttatgttctactgtattgtgtaaaacaagctgaattttacctagatttttgtgttgtacttattctctggtaatatgactggagaagtattttatgtctcaagaattattatgcatttcttatttctctgtcctttaattttgaagggtcagtataaaaatactttattcagtatattctagctcattctccacatacaattatattccaatatttgtagggtttattctctccaagcagcatgatcaatcagaaaattggacagttttaaaaagtggtccagagaaccagcaaatatgaaggcaggctaataaaaatgcatatcactctaacagtttcaaggcagtttcctcgggagactgaggtgggaaggtcgcttgagcccaggagttcaagtcctgcctgggcatcccagtgagaccccacctcttaaaaaaggaaagaaaatggttttttaaatcatttcatttcgtataagattattttgcgaggttggtgcatgacattggagttgcccagcaattggaaaaagacatgagcgtttaatactgggcgttctttctaaggctcttaaagtgaaggcaatcacataaggctatcttgcttcatgggtaattaaggcatttccttctgcagttcccaaatctaatgaagaagaaggaatttctcttttgctgaaatatttcttgtaaggttttcatttcttctcattgctccgactttggaaaaatgttctttttacctctgattttctcttgtaatgtcttcttgaattgtgagtcggggaaaaaagtaaaagattcgctacagattcagacttgcaaaaaaacgcttagaatcttgctgtccgtaaaactgaaacatccagcctcacaaatgtccacatttctctctcatctgtgaaggcccgttgagactgctcagttggtgtctcctctgtccacaggacatggccgtagccgtgtgtggagaagggttgtgatggtggccatcacgagacccagataacaggagtggttagaagcgcagcggaggagcctgtcttcctgggtccgagttgcgtggttaggagcgcagcggaggagccggtcttcctgggtccatgttgcgtggttaggagcgcagcggaggagccggtcttcctgggtttgagttgcagctccacctcttcctggcgggtggcctgggcgagtgcctcacgctcccgtcagtgctctcagctgtaaaatgggaacgatcaggttgtctacctccaagactgttgtcaggattcactcaatgaactcctgtgctttgagtgtctggcgttcagtggcaggggaccctccatgtggggacagagactgccacccattcctttctgaggattcagttcttatagactacagtattactcgtgggagccaaattatgtgcagtgtattttcagattttattgactcacctaagaaaggctcggggacactgttgtgttctgatgtaagagatcacttgttatattatgctttttaaatgttgaaggcaatactcatcagagtatgcattaagtagcattgaaccacatttttaaggtgactcttcaactcaccaagaatatcgtggccgctgaggtcctgcacacctggggatgcgtcgtgggcgccgaggagagcgtagcctcctgttaacgtagcctcctgctgctctttggggtagaccagccgtttccacgcacaggctgcacattgtttcatggcctttgcagttgagcttgtgttggcctctttccgtcgtgaaccatggacgtctctccttgacctcctccctacctgggagaacctggctggccacatagtggaactggaaatgcctccatgctgacgtgtctgcctttcatgaaagatagtagcaaaagttattgttatacgttacaaaaaaccagtttaagacatggacttttttcatatgtacatctgaaaatgactttagcagagattctagctaatacatggagttgtgcttcctaagtattgatagcggcgtatatataggattcccacaatttgcagttgtacagttcaaacaccaaactgtttgtggggaggagggtgatttgcagtgatcttttcctcaactcaggccagtctatacaatactattgatatttactgccttggagcagccttggcagccttgtattctgagctgctgtcagtggtttaaacatttcacttgggttagccttgtcccttcgactaggctggaagcccaagaaggcaggagactcgtctcagatatttcctggtgtccctgaaagtccagcacagtgtgtgcacgtggtatgtccctgatggaaactgcttctcaaagtggaagacagggagcacctctgcaggcctatagggaggtagtaattggatttgcgatgtatttcttttctgcaagtatggttttgtgtgatagaaaccaatgcttcccaaagttcacattgtggaaactgaagccagcaagatactgtgaaggaaaatgcttggagaatgttgcagcctgtgtccctgttggagtttttgctgcccaataccaaattaagggctctgaggaacgcttcctttgaaaataccctagtttaacttaaactctttcttaccaaaccagctatgccacgcccttctgctttggctgtgtagatgctgttccagtcctggggagcacaggtgtgtcctcacgtgcgcttggagaaagtggagttttaattacttacccagcaacattcaggacgtcctgagacctcgtcacttctgatttgggaaaagtctgtgagcaaatgggattttactaatatgaaaacccagaacattccagatgtcctaggaacacaggtcctaggtgtttttttttagcttgggaaagttacgatgacccataagcctgctccacaggatggctgtagcacagacaccttcccctgggacccccattggctgtgtgtcccccagcttctaattcctctagaatatcatgcccaggttaggcactctttctgtattccccaaagcttcataacatggttccatatgtgtcctttttaagagtcttgtcgtttcatactctcattttggcaagacaccttcgtcttagagtgcctacatccatttctgttgaaactggtcatagttagcatttctccatgtctgtgcttttatgccctcctgaaagctggttccatttaggggtgttccctgtcattttcgtgctgtgcaatagttgatgaagataacatagtttataacgcacacctcaaaattcatttcttctcacgtaacaactttcttagtgcttgtacttgtgtgcctcttggagttacttgttgataggacagcgttaagggggtcgtttctttctggtttgaaagttgagaagtaggtcatcactgtcatcgtcatagtggggacacactgagaggttactttctaccaaactgtttcctaattgcactccctgcattgtcttattcagtcccgactttcccaacgcctcgcagcccgatgatacagagacggggcagcagtggagagctcggctcaaagtgcgaagttgtttagatttccacgttacacaaacacacaagcttctcaggggaagagcatgatgaatttctttctttttttttttttaaactaaaattagaataggccgggcccaatggctcacacctgtaatcctagcactttgggaggccgaggcgggcggatcacgaggtcaggagtttgagaccagcctggacaaaatagtgaaaccccatctgtactaaaaatacaaaaacattagccaagcgtggtggtaggcgcctgtaatcgcagctacttgggaggctgaggcaagagaattgcttgaacccgggaggcagaggttgcagtgagccgagatcgcgccttgcactccaaccagggagacagtacaagactctgtctcaaaaaaaaaaaaaaaaaaaaaaaaaaaaacagaataagatacaacagtatcttattctgtaccacagtagtaaatatgttatttggaatatagcttataaataaaatatttaatttacttaaagctgtcatgcccaccaccctcccatagtgaaaaaccaaagaaaaggctaggcccagtggctcatgcctgtaatcccaacactttggggagccgaggtgggcagatcacttgagatcaggagtttgagaccagcctggccaacatggtgaaacctgtttctactaaaaatacaaaaattagctaagcttggtggtgcgcacctataatcctagctcctcgggaggctgaagcaggaggattgcttgaacctgagaggcagagtttgcagtgagccgagatagtgccactgcacttaagccttggtgacagggcaagactgtgactcaaaaaaacaaacaaaagaaagaaaaaattctacttaaagaagaaagaccctctgtgcatcatagatggcaggcacattcaccgtgcacggcagccccacaacaatgtgtggcagacaaccttagcagggcagcttgacactgcgggtccgattctgccatcaagaaagctgcacagacctcatcagaagccactgatgctttggtcctattgaggattccatctctctgtctcggagccatactctagatgcatcactgcaagctgtggcctgagtgtggtgatggtgaggatgaccctgtggtggtattcctttctttcttgcctctggctcttctctccctcactttccctcacccattgccaaaaatgggtttggaggtcattgtgcagtgggtttggaggtcactgtgcagtaggtctggaggtcagcctcaataaaagaccagttttcagccctcacagcctccctgcagtgttattagctgttcctgatttggatgtgtaagcccaagccgccacgtgggctcggaggggtacagagattaactggaggcttgccaaccgtttgtcacacaaatagcagtgccagttaactgagatacgataaatcatttttctcaagattgaaaccttttatcagttgtgtcagtttcattattcgataagcaattagtagcagccattgtcatttagttatctgtagttaacaactcaaagctgctgccagcagggcacccgcttgacacctgcacccaggtggaaacccgtccactgcccacctctccagcagaaattaggccaaactcgcctcctactgccccttggccgattggagattcgtatctgacaggtgtcttctaatttttttaacttacgctctgacacatagttaagttgtgctgtagttaagagaatagtaaacaggtgagcattattctattaccacctactgatccttttatgaaaatattcttgccttttaatttaaatgccaaccatcttgattagagaaatagtgttattccttcctgcacccaagccctgacgtcagcatgacctggcggtagagccagcccctgccagctggctgcccccggggaccttctgttcaccatcaagcggcagttcatctggagtaaggagagaggctggagcacagctcccagcctgcaggaacagacctctggagatgccaagggcctgaaatctgtgtgtaggtttatgtagacagaagtaaccatatattgaaattgtggttaatggaaagcaaagtcgttttagaatgttgccaaattgtgctcatcaaaagacgcctgcatactttttaaaaattgggaaccactgaaagagattaatccttgccaattttttcactttttcactcaagtctaatttatcagaaaaaataattccaccactagctaagtgtaggagaagaaaaaaatcactgaatgtatgtatcattgagacctatttaattattctaccagtgttctggctttacccataatgaagacaggagtgtgtgtgcatgcataggtacatagatacatgcatattgcctttaatgaagatcttttttgttgttgttgttacggagtttcactcttgttgcccagactgtagtgccacggcgcaatctcggctcactgcaacttctgcctcccaggttcaagtgattctcctgactcagcctcccgagcaactgggattacaggcgtgcaccaccacgcctagctaattttgtatttttagtagagatggggtttctccatgttggtcaggctggtctcgaactcctgacctcaggtgatccgcccacctcggcctcccaaagtggggattacaggcatgagccaccgtgcccagcctaatgaagatcttttaaaatataactcataatttaagacgtcattctaaattgcatttctaatgctttccagcacctttctctactaccttaaggttagtgtttggtatttttgtagcgcggccatacatttttgtgaggcctggagccctgtcttgtgccttccacgcccgcagcatctacactgactgtgtggtaactgcccactgtatgtggggactgcatatgttgatccttgtgaaagcttttggtttattgtttaagaagaagcggttttgagagcttctcagccactccagctccccagcgcagtccgtctccagaatcaccaataaaaacttttttttttcctaactaaaaaatctgaagaccattcaaatggaaggttctggtctgccctcttaattgtatagtagctcagtcccttctgtagggattgtatttttaagaggacttcccagtacatttgtttatggggtattctttgaaaccacgagccacagtcgtcttccacgtagcatttcggggtctcggaggctggtgttacacatgaagggcccacagtttggatgcagttaggtcactgttatctgctgttttactctgaaagtggaccccaggcatttttaatttcagtgattaacaaaatcatgtcagtaaactgagagactaacaaaggattgaccaactttgagttttgccaagcaaggatatttaaaacaataaccaccgtggactgccaccatcatttcatagaagaagactgcataagtgcccacaggagagagcaagcgttaagctctggccgaggtacaattaactgacttaccctgatgctgctcagagcctctttttctaattttattgcagatgggagaaaaacattttgtattagtgtttaggaagctctgctcagttaccacctagtggagaaatctaggagaaagggctaaagatgacctgagacatatgtcaggtttccttgactccaggaacaggagtgagaagatggatgccttggaggtgagccagcaggctccagggtccctctaactgagcccctatcttacccctgaaagctgtggggcttcaacctagttcttacacctctggaatggagatagattagtacttcactcatggaaaggctgggaaaatggaatgagataatactttaaggccaactttctaaatataagtctatggtaagtgctcagcatggtacctggctcagcaaaagttagggatggtgacggtgatgatggtgagaggtggtggtggtggtggtggtgacgatggtggtggtggtagcagtgatgatgatagtggtgatgatgatggtgatggtatgatgattaatatggtacagtggtgatgatggtgagaggttatgaagggggttgtgacagtggtggtaatgattgtgaccttggtgagagttggtgatggtggtggttgtgagtgtggtgaccatggtgagagttggtggtggtggtggtggtggtggtagtggtgacggcaatgacgatgatagtatgatgatcaatatggtatggtggtgatgatggtgagaggttatagggctggtggtgacggggtagtggtggtgattgtggtgacagtggtgagagttaatggtggtggtggtactggtgatggcaagaatgataatgatggtatggtgaccaatatggtatggtggtgatgatggtgagaggtggtggtggtggtgacaatgatagtgattgtggtgacgatggtgagaggtggtggtggtgatgatgatgataatggtgatggtgatgatggcagtgtgatgaccaatatggtatggtggtgatgatggtgagaggttatagtggtggtgacaatgatagtagtgattgtggtgacgatgctgagaggtggtggtggtgatggtgatggtggtggtggtggtggtggtgatgatgatagtggtgatggtgatgatggtagcatgatgaccaatatggtatggtggtgatgatggtgagaggtggtggtggtggtgatgatggtgagaggtggtggtagttatagtggtggtgacaatggtagtagtgattgtggtgacgatggtgagaggtggtggtggtagtggtgatggtggtggtggtggtgatgatgatgatagtggtgatggtgatgttggtagcatgatgaccaatatgatatggtggtgatgatggtgagaggtggtggtggtggtgatgatggtggtagtgattgtggtgacgatggtgagaggtggtggtggtgatgatggtggtggtggtggtcgtggtggtgatgatagtggtaatggcgacgatggcagtttgatgaccaatatggtatggtggtgatgatgctgattatgatgttgttgggagcaggagatgaggaacctgtatcttgatgcttccctgaatgttgggggtcaggtctgagatgtgtcaagcggggcagtgttctgacttccattcattaaacttgtaagtcacgatttgtgggtgctcctgatgtgtgcccataacaaacctgctacaccaagaacgtagttttatagtcatgagttccgaatagtctcatagaccattgatcctgcttctaatgactgtcagaaagaatacgtgaaggccagcttctagaccagtgtcctcacgtgcaggcgtcctcgaaggtttgtttgttagtagccataaccgtgcagcatccatcgggaggacacacacccctgcaggccagcttttgtctcaacatcactggagagctgcatattacgttgttatttttgtctttccaattacactaactcctcactcaatgtcattcatcaataggttcttaaaacttcgacttgaagcgaaaggacttataatgaagccagtttttttccttatcagcatcataatgaaacaacgtgggaggaaacaaagttatttgaggacctgctgtacacagttttgcttaaagtcacacatttccaagaacctgtcaatggcattgaggactttctgtacaaaaatcactacgcgtgacagctcaaataataaacagttgttcagagacagtggtactgcgtccccctcctccagtccagtcccccaccctgagcgttgatggtggggtgtgcatcccccaccccccaagcctgttcctagaaggccatggcgcacctgctctgtgcagaggctgggcgaacaccagcccgagcctgacttaagcaggatgggcatggacatcgttggcactcacttccctgcagggaggtgcacagtgaagaataaaacacaggtgatttcagatagtggcacatgcctgaggcaatcagccccgatggtgtggcggggcaggtactagagattgtgtttgcagtgagggccactaaggggggcggagaagacccctgacagcaagaaggagccccacttgtgctgttctgtaaggagggtcttccaggcacagagagtggctgatgagaaagggcctgtgtggaaggaaccagggccaagcgagggaggcagatgccgcgtggcgtgaggagggtgagagtccatgccataaaggactgtcatccatctgtcattggctgaattgtgacctccagaaagagatgagttgtcctaacccccactacctcagaatgtggcctcatatggaactagggtcatggcagatgtcattagctatacaggaggggaggggatggaccctcagaggcgagacggacgtacaggaaacaccacatggagactctggcggtggctggggcagcgcggctgtggggcagagaatgctgagataaacgccaccatcagaaaccaagagaaaggaaagggacaggtcctccggggagccttcatggggagccctggcatggccttcaggcctccgaggaacccagaggaggaaacgcatttttgtggtttcacgccacccagcgtgcggtgcattgtggcaggtgcaggccgctagtgccccccacccagtctctgtgtcctctgcacagtagggagctggggaaggtgtgtggctactaacgtgagcctgttaacgttgaaaatttccctctggcggctgggcagagtgggctgcaggggctgaagtaggcagtggtgacagtggcttccccaggcatcagcgccacaggaggagagacacagactgtggcttgcaagcagagctggcaggacttgctgaaagagttaatatgggaagtgagaggacacagaggccagggccgggagaccaggaggccgagagcggtagaacgtcacatcctggaggggcggggatttccccttttgttttgtttctgtataagatcataccatgtatattctggaattttacttttctaatttaacaccccgtgggtctccagttcttccacaagctgtttgaaaggccacagggcactgcgtggaatgcgtggtctctaataggttatgccagcccctctcgttgggcattgaaattgcctcagcagtttttttaacaattaccagtaatacttccctgaacatcattgcacatacattctgaagcgctcacgctttgttcctgtggacatctctgcctgattggaagcttgcgttgcacattcagcccacgcctccatggctggtcctggactgggtgaggacaccatgagaaacagctagacttgggatgtctgtgttgacagggccatgggtgagaacagagagtttctcaagcgacatgccaggaagagctggcttccccgcacaagcagtgctaccaagggtccatttgttactgagtcattcattcagcagactcgttgagaacatgtgtggtaggcacgtgctgggcactgaaaataaacagacaaacacaacatgacccacgcacccagcctgagcccaggaggctcctggtcccgtcctggaacagccggtgactcaaagctcaaatatcatccccacctggacagtctgcaaatgactttccttcttccctcatcccctttcccatcctcactctcttccaagtatctgattgcacgcatgtgcacatgtgtgagtaggggagaggctgtgtgttttcataagcgaatcctgattttctgacaaaagagacatgaaacaaatatgttaacaagtaatgttgctccctctcatgagggggtcactggctgcccttatagaaggccttggaaagaattacttcatgcattcctgttcattggcggtctttggcctttgagagtggaactctgcatcttcttgtccctcctggatgaatacaggacacttaaacatttaaaggggggacacagagatgggcaggactgtgagagtccccctgaaaagcgagatttcatagaagtattgaattttaccaaaagtttcagaagtccaattcattattagatttctataaatataaatatttatatgatatttcttgcgttgaattcagtatgtgctcaagttaagtgtgatttgaaaaatgaccaagtctcctaaggtgaagtttgtgtgtgaacaggagggccggggtcgctgggttccaggcgcagccatgagacacctgctctgcacccagctcttcttttgttttgctcaccgagaaaaagaagactcgggaaccacagaactaacacagaagtaagttagaaaattactcacgtattcgcccactgtgtgccaacagagtcttgatctattgcccaggctggagtgcagtggcacggtctcagctcttactgcagcctctgcctcccaggttcaagcagttcttgtgcctcaaccccccaagtagctgggactacaggcacatgccgccacgcccagctaatttttgtatttttagtagagacggggttttgccatgttgcccaggctggtctcgaactcctggcctcaggtgatctgcctgcctcagcctcccagagtgccaggattacaagagtgagccaccacgcccagcccaggatgctttcttttcatgggtctttgtcctttggagggccttgacctcacgcagcaggggaggatgctggcccacaccaaggcaccaagattttacccacctctgtgtgtggtcgcacgtcctcctcatggccacgctgggatggaggtggactctgagcacagacaagggacccatggcccagagcccagagtcacccgcagcccccctgcgctgctgctgcccgcatggggtacccttaagtcccacatccaagctccctccaccccacactctcccttggatttgcgcctgttctttctctggctgtgcacctggcagtgctgagaggagagcctggtgggcacttccaccctgatcaaattcagtcattaaccccactgaaacctgacaaggcctgtgtgcagctcactgtggaggggtcactgctgtcctaccacttttttttttttctggaagtttgcatgtcctacactatctataaatatgtaactttttttccaaagaacttaaaatgaaagaatatgagaaaacccctaaataatacatacatggtatagattgatgcataaaacagtcagcccctggactccatggctctgtggaatgggcggtttagtattcctttttctggcaactcacttagggcttttacaggtgcaatgagctttggtgaaaatagccaatgggcacctcgtatcttgtgccccaaatattcctatttagcacagtgtattctggatgcctgagtgactgcaaaccctcctcctgtgtaactttgttactgtttttcctgtctcaggaaagatgctcattttgtctcctgactgtggcagttgggggtcttgagaccattcctgagtttagaccttcccaggggagatcagtgaccacagatgtgcctcggtgaatttcacaaacccagcttagcgtgacccaagtttccagctttaccgaactttgtcattgttattaaaaagatgattttagtgtgctgattagaaactgggatccacattcaacataagcacaaactttttttcccagtgggccaaagctcatttctgatcattaaaagctaatcctgaaaattagctggagcatggttcaagcatacgttgtaatctgttaaaagcaaaaataataatttcaagcagtgttctgcgtctgtgtggaaacagctggtctaccccaaagagcatcaggaggctataccctcctcccacaattccaaataaaatatatggagacagcacagcatccggaagaactggcattggtaaattattgcctccaaagaatattagttagcaaacatactttgaaagccatcttcacaatcataaattcaatagtacttctttcagtcacaactgaatgccagttggggcagcctttcgagttgttaagcagtttagtagcaaatgtgacatatagtgtgtgtgccacagtaagatttcaaattgtcattaatttgtaaaatttaggagaagaaatgatatattgtgacgagataatagttttctctgtatgtactccaagctatcaaatacttctagcctttaacttggcagtgttactcttggcattttattctatggaaacaactgaaatgaatggaagaaaaaataatattcctgttcaagatgcttattagagtgtatttgatagactttgttttctaggaaagctttagacttttagaaaaattgaggagatattataggttattcccataggcttcccaccacttccccctgacaagtttcccatgttttttgtgtgtgtgtgtgttttggtttttgtttgtttgtttttgtgacagggtctcactctgtcacccaggctggagtgcaatggtgcaatcttggctcttgcaacctccgcctcccagactcaagcgattcttgcccctcagcctcccaaatagctgggactacaggagtgtgccaccggctaattttttttatttttggtagaaacgttgtttcaccatgttgcccaggctggtctcaaactcctgacctcaaatgatccacccacctcagcctcccaaagtgctgggattacaggtgtgagccaccatgcccaccctctcccctgttaatttacctctttcattagtatggtacatttcttagagttcatgagtcaatattgatatgtttttattaaagtccacactttatttgcatctctttagctttaacctcatgccgtgtctctgttccaggatccaaatcctattccattgtcatgcctccttagccttctcttggctgggacattttctcagacttttcctgtctttgatgaccttgaaggtcttgaggcatgctgggccaggtgtatgataggaatccctctactggaatttgtgcaatgcttttctcaggtttcatcttgagttacaagttttgtggagaaggaccacagggtgaagtgctatttccatcctatcctgtcaagggtatataccatcaactttatttatggctgctgatgttgaccttgatcctttgacttgaggtagtgtctgtcaagttattctgctgtaaagtcattgtgcccctccacagcccatactgaacttttggaaggaagtcactgtgcacttaaggagttgggcgttagaccccctgtccttgagggtggggtgtctatgtaaattttttagaattcttttgcaggggagatctgtttctctcccccatttatgactatattcagttgtctatttgtattcatgtggacttgtgaatatttattttgtattctaggctgctatccaatactgctgtggcccagattattccacccgtggctcctgggggctcctctggctgctcccacaccctttgccctacaccccatctctgtggggtttcttttgtttgagcactttccttcctttctgtcagtacaaggtgcattttgtatctttcctgccacaatcttagaatcggctgtttcccaaagagctctggttccttttactggagaatggtattagaaaccagtgtcttggagctaggcgtgctcgttgcttctggggtgccatttcttggttctcttggccaacagagtaaagaacgaaatgtgtgtatactaacctgcatatgcatatatatctacaaatatttctatatgtaaccatctgtatctatatttaacagatttcatattcttactggcataaaattggaaataactaagtgttttaacatgaggaatggctacaactatgttaatactacctccatgatgcaactgttataagggacaggttggaaaactgtggaaacataatactttacattaaaaagtagtattttttattgtagagtctccaacaaaggtctctgttggagttacgcttacaatgtgatagttgtgtgtgtgtacggatatgaactttaaaggaaaaatggaaaaggtagataagccatggcttattcatattaaactaacataaaattaactttgcttctgccataatgttagtcttccagtgagttcttgctgaaacctgaatgaagttgatgtatttaattttaaatgaaagaaatgagacactttttattccgttgttgtgttagccctgcagtgctttttcaggccctcccagattaataatgaccttgtttactcattgacagtaaccaaagagcctgctaaaaaagttgtgaagttaaggtcaaagcagttttatgggaggaaatctgtgagtgtttaaaggaaggatttccataatagcaagaagagcccaaagttgggaattcttcttttgcttttccactctgatctttgtattaatgcttgattgactgaataaatgccatgtatcttatggttttcatgatgatttctcaagccacacgtcaggatacttttgggaatttccagagaagtccttaaatggaaaagctaaaattatctctagtagatattttcaccagtcttcagttcagatggcttacatataagaggagcatgattgactggataaccctgaagtgtatcatttcacccgctgtagttgtcagaactcaactacaaagatggcagatcaaatacttcaagaagggtggttgtttgccattgtggaggctggtggtccagcgatcacagcccctcaattacggccctgcgtgagagcacaagcagcagtcattacataattatacctctgattagttggttgaactggccattgcctttgaaatatgataacacaatttggagttttattaaaaaacaatttttttggaatttttgaaaaagattttgtgtttaagaaaaaagaaccaaagggcctgcaatatattctgttagaggagattaaaaagaagaaagggatgagggaaaaaaagagatgaatgtttcccattatcactcatttctgtctcaggagggctaaggtggcccctgctcaccagccttcccctctcggcatcaccagcccccagcctgctatccgcttcacagagcagcgagccagtccttggagaggggacgtgagaaggggcagaagtcaggggacctgaggctgctccccggcaccagtgctgctcaacacacacaattgtgtgaccaccactgaacaaatctcacaagaaagaggtgcattttactccacacgtcatttggttttgaaaaactaatttgaacctcatttttttctaagtgagaatttggtttgctgtgtgtgtgttttcaatttggattgccaagtattcagtcctaacatatgttatggttggagtgcatataacactgtgcagccgaataactagacctagaaaataaaactgatcacggtaaagttattttccaggcaggggatgcctcatgatactggctggggcccaaccacacccaaggcctcgtcggtttctgttctcatgctgttgtcatatacccagaagtaggggaagcccaggagccatggagcctcagtgtcagttccctgacaagccatcctccaaaaaagcctttcctttgcaaaatgaacaggtactccgtgaaaacagggagagaaatttctgtttttcaccgatgcatttctcacgttcatctgacaatgtgcaaaacaaaaagtctacattagaaatttatcatgaagttatactctacttcaactcacttcttttcagtccctgtgaaaacttaatactcttggtgttgtactgaaatacccagtggatttggggtgcacctgtacccttgatctccacttctgcgtgtttctaggccaaagggaaaaccaactctctacctaattggaacttctggttttattgcatatcctggaggtcttgcttcgtttttattttcccgggttgatggtctttcccatgtgcacctacgttagcccactatgtagaacgccttggcagttttcacagagtaagaggttgaaggaagccaccaatgtgaaaatcatatttgctgtaaagaaagaaccattgtgagttgttggaaaccagattaaaattccataattggagattgatgacttttatttcatgagttttacttagttaggtgttttatcttctgtgttttgtggctccaaattacgaagactgttggccttgcaagaaactgatcacggcaaagttattttccttactgaacacgtgtcctatatatttgcttggcctcgggttttgtttaatcccttcaaaggccctttgaactgatgtttcaacatgactccttctctgtgagctctccgctaggaagcggccatcatgtcaagccccttcacagctaaagtagtgagttcacatagtcgaagaatcttctgggttgcatcttatgaaaaaaagaaatccactgcctttttataagagaacagaacatttacaccgtcttgttgagcaaatgaacgttcaaatggccagcacaaaagaaatccccaatctctaacctcacaatgaaatcgccacggacaaaagatcacgggataccgggagcactaaactggaagtgacacaaaaccacagcagaatccgctcacacctgccgaggttcctgggggatgatctttgtgtaaaggatcctggtgccgcagtcagcctgaaacactccaaggagcagagacgctcccctctgcaacagtgacatttatactgatggcgtctttttaaataaattaatacatgtctgatgtggacagagtagtgctgtctgacaaggtgatcatttgacttttcttagaggtacaaatttacgctcccttctatgaatagagagggctatttgtttcattcaaagacaagacattgttagaaatgagtggcacacctcttcaacccatccccttcctccatggaggtaaaaagatcctattagttctcataattgattctgagggctgcagcgtgcctcatttagccgtccctgctcggttcacgccaaggatgtaattcatgcacacttggacgtccaacatggctgacgcgccttggacacacagcctcggcgctgcatcattttttaatcagctatctgaggaatatttatctgatcaacaaagagtgttgtcaggaggagaccagaggtgacattaataagcctgtggtttcctggtacaatgatggaggaagagtttggaataaaaccctgctcgtttgagcatgccagcagactaaagaatatttttattctgcttacaaagagccagtcaaaagagtctcagtttgaagtgttcagttaagtttaagtctcagtgataagttttcaggcattcacatgtgttagtaaaaaaaaaaaaaacaaaaaacttttagagaaacaaattaacaaattttatttcaaaataaaaatttaagttcctcatgtcgcaggaacccagatgaaaagctgtagcttctaaaaatagggagaggtgtaataattgggagctgttaacgctaaatgattccagctactctaacttagtagaaagacgtagtaagctgcacactttccccttctgtctgtctttgaaaagatcgtgactgtctgttagtaattacaaggagctgagtatattatgccaggcctcgtttggtcatccagacacaagatttgctgtttataacgatcagatgccttaagaaatgttctgtgaattaaagtttctatcacactttcttttctaagtgcatcactgtttgtgcaccacatgagaccctcatgagtggagtgacacccatcccatctgccaacctgaagacgcagaaagtccatacatagccagtgtagacatcagcacactttgtccacgttaggatcgtggtaccagaaggtgccacagtgatctctctttgtaattcaaagactgcctcatgaattcagtttgctaacgccttcggtgttcctcaacaggagggctctgtgtgtgttttccggaaaattaataccattgttatattacacaaggataaataaacattttgtcttagagtttgggagtgagtctctctgcattgtcttaacctgagtttttcaaagttttgatccttttaatccttagaaaatacactaaaaaagtacaaaaaattagtcgggcgtggtggcgggcactcgtggtcccagctactcgggcggctgaggcaggagaatggcttgaacctgggaggtggagcttgcagtgagctgagatggcgccactgcactccagcctgggctaacagtgcaagactccatctcaaaaaaatgaaaaaagaaaatacattccagccagcatgatgatgagttttccatgtgtgttttaaattcccagcagtcggtggtgattcccttgtttgacctcttgctgtgatacccgcatgtagcacccttgtgtttcacctgagttcacggttcacgttttggcaccattgtggggacagtgctgtcctcccacgagtggcattctctcccaggcccactgactgttctgcctacccagattagagctcagaaagttccatttaatttgcagactaaagtgagaagagatcagtctcgttgtctacactggagctgacagtcagtttgtaccacatctgaaattatacttgtgggatttcatgtccattgagattcgcgtatgtgtttttaaacatgtaagacagtgctgagacatcctgccgcatacatagctatgggaggcattgtgaaactctgtttaccaaagagacttttgcttacgcagcaagcaaaatagcagaatggaaaacactaacggaatgctcacaccctgctgcctttttgtttaataacaggtgaaattttgatactagaataatagattttgtgagaaataacattagtaacaaaatcaaaataagttagcctgtgtttaagaggaagaaactgtattcctgaaagtagaacaggaattttactaaaaattttaattaaaataaagacccggaaagttttagtctattgctagtccccctgaagtccccgagaatcgccttttattccaaaggcctgagaccagagggaggctgccagtggtgggcagtggctgggtggcaccaaacatcagctcggagcctcctggttccatttggcacagtgtctccgtagcccctcaaagtgattccaggcagcagcatccgacataacccaaggtgttattgatgataataggattgtattttcttgttgagaagcttctaaacaagggaacttagagcaatcaatgcccccggagaccgatgcacatatcaggaccttggtatcagctagaaaacatccatttgtttaaggggaagaaacaggcacgacattttgcacattaaaatggattatttcatcaataggttaatagaaagccgggctgcaagttcacttcctgcttatacatcctgtggtaatgggagagcagagtgtgaaaaatggaaggcataaagcgggcgaggaaagaggctttctgcactcgggcacccctcccctcccgaggggtgcccagcctccattctgcctatttatatgtaaatattgctgcaagaggtaagttgtactcttgaggagtgcagccttctcatggctacctctttctggaacttgcgaaatactgtcccagacaccagagctgcagcagttaaaaattaagcccatgcctaattctgcatcatcatgcctggggcccctggtacatacccatcaagcatttctaaagcaaacatttgagacccgggacagatttggtttccttcgttcctcatgcatggtatttgtaccggtgggtacctgaagatccttttcccaggtttggagttacctgagacagatacttaggtaggaccttatagatagtgaagaaacctgaaggtatagacataaagaagtcttcacttgtgaaaaattaaatgtagacccgtatcctttaacaccgcagatgcctgctagtttagaggttgtttcttactaaattattattattattattattattattctcttgagatggaatctctcactgtcgcccaggctggagtgcagtggtacgatctcagctcactgcaacctccgcctccagagtagctgggattataggcgtgccccaccatgcacagctaatttttgtatttttagtagagacggtgttttgccatgttggccaggctggtttcgaacttctgtcctcaagtgatccgcccacctcagcctcccaaagtgctgggattacagacgtgaggacctggcctatttgttgattttcacactgcaaaggaattgttagatgtgtttagttataacaagttaatatcactttaaatcaagaagcaactaaatcacagctagtttttacttgtgaataatgtaaaatttgcatcctaaatatacagtgctttatcgcagaattgtatttgcttccttaaaggctcaggtttctcgcgtatgttttgtgttgtctctacaaagaaatccagtgtagttagaagcacttgagattcatttctgcaacataactcatcccaggcgcctagtcatcaccctgggtcattttctggccaccagaacttggtgcacacgccgaacctacaaccacagcctcagctgtagtgttcgaaatggagaattttggctcaaacactacagcaggcaagaagagttaacctgtcgtaagtcaggaacacgttggggttgattagggagctgaccgttggccagctcatgctttgggaaccagagggccagcctggctgcctgctttgcgggcttaagacctgcctctggaagggtaagggcctgcccgtccagataagtgctgctcacctgcattaaacaaacggccacacagagcccagtgggagcctgcactggtttctcttcctgcctgtggcagttgagagagacagacggtcctgtgagaccccttcttcagaaggtgaatgacagtgaccgccactaaacattccattccacctgcctgcacggcagtccaagccctctagccctgtgacctggggctgtgcctttgcttgcatttgcctgaagagttgagccaccctgtttaactcttgggtttttataaaatgtctcctgaagggcggagagaatgcctcaagtcgatgtcttccctgccacagatgtcagcatttctgagttgatagttgggagggtaagggcctggtggggtggagaatgtgtctctggagggtgggggccccatctcagtgagccagccaggcactgcacacagcctgagtggtgggcctgctgcgcccttgttaaattggttctcttccgaacccagcgtcccactgtcggtgacttggcgttttgtcctttctcctgagaacctgaggtggcatttgctcttctggttcctaggagctccatttagagccgtaactcccccgagtgtcaaagagaatagactcctccctccaggacagcagaatggcactagggggttttgctgctgtaggtattgcctgaatcaaaatctgtctcgggaagacaacttcacttttaacagctcttggttttaaaacctaccttctccaacacataggcatgaactgctcataaccagggtctcttgatttgacatgctcctaatatttggccgaatcaaagggcttgtggcgactggcatcatagctccttcaaagggtgtcatcatttcccaaggcagaggccagtttttgtgctgttttgagtagccacgtgtgaaacccagcagggcgaagcagacttctgcgcgtgggtagttctttgacgttagatgcaatcctgatgaccctgctccacctctgcccttcctgagttcctctgttcaccgcaggggagttggagggctcagcccagggagctccatggcacccacccgcttcgcgcagacagctcggaggcaacgtcacgtgctactttgacctttttttttctccccttttcatttgttttcttttcctttttgttttctctctttttcccctctcccctttctgctctcgggatgcagccaaacgcaaagcatggaaactaaaccgtgttggtagcctgcgaaatatatacagcagcagcaccaacactgaaggtaacgcctccgcacctccacccgcccacacctccacctgcctcttcccctctcatcccctgcccgccccttcctttccaacacaggcatggaaatgcaatttgcccaaagccgcatgctcccttattgtgtttgcagagtcattcctgtggtcttttcatctttttgtttgtgtgttttattttaccattcgtgttcctttcagcttacttaaattttgacctttcccttcagtcgtagagtagtgatgtttaaattacttcagaaacctattttctcctcttttttcttttcctttatacatgtgggcactcagtgtaatatttcccaagttattacagtttttaaaagtgttagtatcaggtgtaatgatctgtagccaaatacaatagtgtgccgtgacatttaagtaacagtcttaatttgttttgtggaagcattctccataatgctctctgcagctctaatccacaggcaggcaggcccgggccatttgcatgggctgctatttgcttgtaaagtcagtattttgttgtgtttctaaaggtcgtctggtgccaaagttcacaaattgacttgcgttgcttttttcaccgaagacagccgtcattgcttttgtataatagcagattgaatttttcccccaccttcatttgaacaacataattataaattgcctttttttttatgattacaaatgtcaagggtcggaattactttgatgccaggcaagggaaaaccaccaccatcagcccaagcgcacataagggaggcgggggcatcgggcgtgtgatgcaaagcaggtcacaatccagcgatcttggtataatagggggacattttttttcacttaagtgcaagccaaatgggtcaagtaatcgcaagctcgtgccctaacactaattgacttatttggggattattataactgtaatatttttcttaatgtcactgttttctgggctgttgattttagcgattgccaagcaatggcattaaatctcttgtaaattttaaattgcacgttatttctgtaaacaagtccctctcttcacatcctggtcattaacctttgccgatttatatcaccatcctctttttttctttctttcacaattactcctgtcttgccgctgaacgccctgctctcagccaggaaaaaaaagaaaaagaaatctggaaaacaaatctacattttcactatggcttgttaaagagccattttttaatcataattttttttttcatttctcaagggaaaattgttgtctgttaagataccagtggagcttggcctcattggtatcttctttcaaagcactcaagaaataaccaaatgaaagagggaaaagaatagaagttaagaaacggtcattcattatcatttttgttgcattttaaagggtattagtatactcttttcaccgttttttaaatgtttttcaacttagcgtgcatatcatttctcctccctgtgtccttatcaaatatgttgggtttgctttttttttttttttttttgtatgcatgtgggtttgtcgcaacaaatttgtttattgacttccagcctttaaaaaaaaattgtgaggtctggtttcaaatgcagtgtatagaaaattgggggacagcaaggggacatacctccttagccttgagggcaaatggttccctgagacttgctgatgggccttcctggagacactggtgggtgacacgggacccagtagaaccaggagtgaggatttgcagcagtgcgaacttctcagccttagcttctcaggtaatacacagcatctgctctgcccagcacctcggaggggtggagagcgtgaattcctctctgaaatctgtcagtactggatagcactgcaaacatggggtccctctgtcagtagctatgaaaggcattcctggggatactaaatagtgactgcatatccaattgtccctcacaatttctttcatttttctcagttatagtaagtttctgtttggtgttcaaggtcatgtatgaattttcaattaaaagacagcattcttcatttactttgggtttattttaagattaacatgtgtacacatacaatctcatttcatacggtttttaataatgtattacagaattcaggccagacgcagtggctcatacctgtaatcccagcactttgagaggctgagacgggtgggtcacctgaggtcaggagtttgagaccagcctggccaacacggtgaaaccccatctctactaaaaataaaaaaaaaaattacccgagcatagtggcgagcacctgtaatcccagctactcaggaggctgaggcaggagaatcgcttgaacccaggaggcggaggttgcagtgagccaagatcactccactgcactgcagcctggacgacagagcgagactccatctcaaaaaaaaaaaaaaaatacattacagaatttataaaattatataaaataattgtcaaattcctttctgatttacagccttttgatgtatgaagttatcacatattcactgtctataaagtgacccttcatgaaaatttgtatcctgaacattttaacttttgttttaacctcacgtcgtgttacactaaatatatccatccccaagtggagtatcttttaaagtggtccacttgagtgatttactcaaaggcacccaaaaaacaccacccaagtaaggtggacactggagtttcctgtgtctagagggagaacttgagcttcaggaataagaggagaccacccactaggagctgggagtggactcagctgttctgggactttcctcaggatcctggtttaggagagacagacagagccaaggtttgagtctaaggatctctctgaagccctttttcttttatgtcctctctcttccggcctctggaccacattatctcatttaatcttcacactccccctgccaggtaggtatcatgttatggatggaaaattgggattctgataactcaagtgattttctgcagaacaagctagcatgttccagaggcaggacgtgtgcccagatctcttgactgtgggacctgctcacagatccacgtggaaggagtttgtggatggaagtcaggagtggataaaaacaaacaaaacttacaagggaaacgcacagacaagattaaaaaacaaaaatattttatcttttgtctgtccattgtggctaacactgaaactgagatagaaactttggatatatatgattgcactaatgtacaaacttttgttgctttttaacaattaactttctcaagatgggtgaaattgagttttcttcagccagaatgcagctgtaactttaacatctcaggaacctgtgaatggaagggtgtcttaatggtatgatcctccaattaacagctgtctcccaacccaagggagaataagatctaaataccagatgactgaggctagactcaccaatgttcaactgaaagtaaatgtattggagaaagaacaaagaggaccaagtggcagaagagtggacgttgtgcaggaggaaactcgggagggaggcctcttcgctgcaccgcagggcagaattgcacaacacctggacccatctccaggcctcacctgccccatgcagctaaacagatgacattatcatccgctgtgagttgggtgaacacatgggctctttcaagagcatttaagctctctgtttttgcagaagaaaagtacttccagtacctaaatagataaaggagagaggtgttaggaaacaagggggcatttcttgggatgccaagcccattccctggcagcagaatgaatacttaagataggcctcttcaaataggtgatgacacttgcatccaggtgttagccagattcagtactggcctaaagtcccaattcgagcccgtctatgagggcccgtttctgtggatttagagctcgccccagcaacaggcctgggaaacctctgctttgggtacttccgttcaccacagtgggccagatcgctggaacccagtctccccgacactgcgattccaagcataggcattgccatggggaaacagcaaacctcctcttggaaatttcatcacagatacagcttcgcgcctcaggcctgcagtcagacccgcacctgccttctccactgaacagcccagatggtcactgttcctctgagcagatgtgagcaggcctaacttgttggccattccctccaacactcgttttcttggtcacagttctgagacttccaactcattcacagttaaacaaattacaggcccacatctgagaatgatggtcttgctgagtgtgaggtaggcctgcctccttgttcccgactctcaggtccctgctgggatgcgccattgcctgcgctgggtgctggggcaatggagagggtaagggtgcacccgcccactgccctcagggagcttactgtcagtctaggaggctgcacaaaggatctcatgcagaaggagggaagaggccctggatgctctgggggctttgtggagagcagaactacatttgatttaggggtcaggacaggtatcatggcctgcgggatgtgacaggaaccacagtgaccgcatcctcagtgctgagaaatttccaacatcctgtcgtgcacccctagcagagggagatcttttcctccttgttttataaaagaagaaaccgagcctgggagaagggcaggcatcagccccaggagctctcaggaagacggggctggaattccaggtggaggcagcagcctgcacctggacggggcttagtacagagcctgcagcgcccttaggcttgagtgtgaggtgtgtgccgaggattcttttgggaccagtaccagtggaggggactagatgatccacagatctgcagacagctgtcatcatcatctccagcagaggaagaaggcagccctgcctgacaatctgtgacccattgtgttgtgtgtttcctgaaggactcactgcagtgtctgatcaaggcccccgccaaatgccccggcagtctccccagtgccccgtgtgggtccccactgtgagaggctgccttccagaacctgctctctgcagtgagcattctccaggctcagatgggttctctttcacactgaatcactgctcttgtttgtatgaggcaggcatgggcgccagactcaagcccagatcttaactcaggtggtcttggttcagtcccacatccccacttcatagctctaaccttgggttcttgatgtgtcttctctgtacctcagtttccccacctataaactggggtgatgacacccactgcacagggttgtggggaggagtcagcaagctaacatacctagagatgtggaacatggcccctgcattgctccttgcctaggaccagtaagccccagtactcaagcacccagattctctctgttttcaaagaaaattgcagtgtttgaacgttgtttatgtagccaggaacagagatttgaaaagacgtgttgcccatgaagcataggggggaatttagaaatgaaacttaacctgttatctagacttttaaacctaccctcctgcttccatttgctgtcatctgagaagaatcgtcagttgtagaaatttggctaaaagcgtgagctgtggagtcacacacgcctgggtctcatcccctctctgccacttcccagctgtgtggcttgggatgctttcctgggtctgtccttcctctctgttcttttcttcctcgcatgcagacaataaaacctaccttgaagggtaattgaagaagaaatgaagtgaagcctgtgaagtgcttcccacagagctgggcacatagggaagctggccgccgtggctgctattaaattgctatacagacttatttaatagaaaaatgacccaaagactccatggagaatatctgtggactattcagtaggcctttttaatgtatcggtacagagcagagctggccaaagccacccctcctcagtgatgagcagcaccaactaagaactaatgcaggtaggccgggcacagtggctcacacctataatcccagcactttgggaggtcaaggtgggtggatcacttgaggtcagacattcgagaccagcctggtcaacgtggtgaaaccccatctctactaaaaatacaaaaattagctgggcatggtggtgcgtgcctgtaatcccagctacttcagaggctgacacacaagaatctcttgaaccagggaggcagaggttgcagtgagccaagatcgtgccactacactccaacctgggcgacagagcaagattctgtctcaaaaaaaaaaaaaaaaaaactaatacagataacttcagatttaggaaacccttgcatggggaataactagaattgacgttttgggaagagaagattgctcatttttctagccccctccttttgaaaggatgacagtcttgggtatcaatcacctcagcgctgagcagcacctaggagaggaagccctcaccgtggacagtggagggtgccgctgaagattcctggtaagcccgggtctcctgatggccatgctggactcttgcagaggaacccgccctaggcctgcccaacatggccgtgctcacttattcctataattaggagtccgaggggacctctgcaaagtggggagtgtgtcaggatgagtaacaaacagttaccgcttagtaacaagataaatcaccgcacgtgcctatcgttgctttgtctttctaaactgaatgtttgggcctggagctttcacagggtatctgggacagagaaagtacaagggagatagcaacactcacccctgctgtatcgcaagatgttttcaatttgcggtcagataactatttttttttccccaagagctttgttttggagtcttttcttaatttaagacaggcacgggccagacatggtgactcacacctctaatcccatcactttgggaggctgaggtgggcaggttgcgtgagttaaggagttcgagaccagcctgggcaatatggtgaaaccccttctctacaaaaaatacaaaaattagccaggtgtggtggcgcatgcctgtagtcccagctactcgggaggctgaggtgggagaagcgcttgagcccaggaggtggaggttgcagtgagccgagatgaagccactgcactccagtctgggcgacagagaccctgtctcaaaaaaaaaaaaaaaaaaaaaaaaggcacatatggcaccctacagctctggaagccaaagctttcaaatggagtttctttacacgtggtccttgaactgctatcccagctctttataatgtgtttgaaaaataaaaatgtcctttgtatgtcatgagaaccttcccgtggtaatatttagtagttaaacattcctaagctcgtaattgacctgtggggatttgcttcttcacagaattaatcacactgttctaaattaagccacaggacaacacctctgttggactctcttggctagacaaagatgttgaccaaattcagagtttccaaaaataattagctgagaaccgtgaactgcgtgtgtttataatgatcttttgtttttgtttaaaattaataacttctcaagtatactaagtatatccataggtttcttggttctgtacaaccctggtccatattctccaggcttgcctacagtctttgtcttttatttttggacagagagtctcactctgttgcccaggctggagtgcagtggcacagtctccgctcactgcagcctccacctccagggttcaagtgattttcatgcctcggcctcctgagtagctgggattataggcacccgccaccacgcccaactgctttttgtatttttggtagagatggaattttgccatgttgcgcaggctgctcccgaactcctcacctcaagggatccgcccccaccccaggcctctgaaactgttaggattacaggcttgagctaccgcacccggtcagcaggctttctttcacatcagtcttttcctacaaaaatgggagaaaatttgaaaataaaaactgactttctaatactgtgttttggctgacatcttagtgtgtgagctttttgtcataattgggtaaaatatctaagccacacgcctatttaatagatggttttaaaacagaaatattggaggattttacaaagtgtatgaggaaaaatagcattaaagcccgggtgtgtgcgtgacattgccacacattgcctcttagggtcatggtagagggagaaagaccacaaggtagcgagtatattccgtctgagtttccgaccccgttgcattgacagtggctacctggagaactgtgtgaagaggaattctggggctgcaccagcctcttcaggaacagttaggaatgtctgtttttaaaagaaaaggagagagagcttccctttgtcatcccgggtccagcctggcacctcccttgcagataaagctgagatcagaaagatgaagtgggctgctcatgggcaccagtccgtcgatggcaggatgggaagtaggttccaggagagagaaccccaaagttggagctccagttcagacagaaactgggagaacccatagcgaaaactcacttgttaataggggaaaaagaaaaagggcttggcggaaggtaagcatcggtggtaatgtgttcaccacggctttgtggtgtgtcctaaaacagaagtcccaactctttcaccaaggtcaggagtggagaagatggttattttctgcccaggccttggctgttgtattgtcccgtcttttcggtggtgctgtctggaggcctctgggcttggtagatcctgcactctttgtacagcaaacatgcccgtcccccaggctgagcatgtcatctctgcaccgttgcgatatcccatttcattttcatcacaggttgctcattaaatgtgtcacaaaggatgcttagccttgtggacagaacactggatgggcctcaggagcctggatttcaggctatagggcaccctgggagaacctcctctctccccaggacccagattctcatccggtcattgaagaacttggagtaagtgacttctgcatcctccttgagcccttttctattcagaagagaaacatctcggcattgcacctgcacccatcagtagtttgtggttggttgttttttttttttgtttttttttttttttggagacagtctcactttgtcacccaggctggagtgcagtggtgtgatcttggctcactacaacctccgcctcccgggttcaagcagttctcctgcctcagcctcccaagtagctgggactacaggcacacaccaccacgcccagctaatttttttaatttatattttagtagagatggggtttcaccatgttgcccaggctggtctcaaactcttgagctcaggcaatccacccaccttggcctcccaaagtgttaggattataggcattagccactgcgcccggccccatcaacagctttgagccatttctcatcgtagctcggggcacagatccaggtcctcttggcctttgcaagagcacagtgcagttgtccttttccccagaccctttccctgagacctgtgtgtgcctctgtgcctccctccttccctcccctcgcacccacttctcccccatgcatccttgtcagatgcctcctgttgaaagcaacttccaaatgtgaaacggttttcagctgcttttagccctttaaccctttgtctgctagaattccgcaaaaaaataattgatgacggattggcccattaacctttaagaaaaaaaaagtttgacagcccggattcatgtaatgaggagggattccttgtgaaatcagtctgatggctgagtttcttgcccctaaggaggcaaaattagccccatggggccttgtctgcatagaaactggacacaattagtgtaatatccggtgttattaatgtcgtttggaataattgggcaggttgatttcgacaggttcatggtgctaaaatactattatagtggacctttccacagctaactgttaaacacagaaaactgtttaaatccctgtgagcccaatcacaaaactttattaaacagctaagccctggaatgtcacactgggaaacagtacaccgtctgttacttcaggctttggggtgtggtggcatcttgatttttcaggaacagggggattaattttgctgtctgtgtgtgtatctgaaacttcaacatgcttttaatagatataccatcaggagcttctacaacctgaaatctgtttttacagtgaatgaaatagaagccactgcaattgtcacaaataggtagtttgtattagtgaaatgacaccactaaaagtgaaagctccgaacagggcatcctcacaggcacatgctcgttctgcacgtttgaagtgagggtggcagtggagagtaatgctcggctctgtctctgactgatgggcctcacgctgccaattactgttttgatcatttttaatctagttgctcataagtaaaatgtcatcaccgtgtcacttcgtaatgtgctgcagcccttcggggccatcggtgatttgaataaggctctatcatctgctaaaaattcttctttgaaccttaggaggagcatgttcctgttctctccacacagaagaagggaaattgggtccaaaaatctattcactgtttacataatgagcgtaaatggtcactgcaatgccaccgaagtgtaaacacggattaaacacggattaaatcttgagatttgctaggtgttgacctaataaagtcaccagagcagcacataggagatcaccaccaggatagatcttctctactggattagtcagaactaggtttagtaacaccagaaatccagttttaaaaaaaggagacgctgggcgtggtggctcacacctgtaatcccagctactcaggaggctgaggcaggagaatcacttgaaccccggaggcagaggttgcagtgagctgagatggtgccactgcactccagcctgagcgacagagggagactccttctcgggtgggtggatggatggatggatggatggatggatggatggatgtcttatgtaacgaactgtaggacaggcaggagcttcagggacctcagaggcaccaggctccctgccacctcccatccctggcttcactctgctgggcagcagcattcatacctgtccacagggagtggcctgataacagaagttttccttcccatggagagggcagaggcacctgcacctgcacctgtgggccatgtcctgacaggtcccagataagaggggaaggcactctatggacacaactcagatgtgaaaccctggaagacacttgatcatgtgcccccaccaggactgatcagagtggccagggacatcacgtgctccagttggccaacatagatggggccatccctgctccctgtgctggccagggagccagacacccggcaggtggcacgtggaaggcccagaggaccaccacctctgtgtaccatgtcccccagcatttaccagactgacctgattgtgtgactggacatcagttagaaagaagtatgacacgccgggcacggttgctcatgcctgtaatccccgcactttgggaggctgaggcaggcacatcacctgaggccagaagttcgagaccagcctggccaacatggcgaaacctcagctctactaaaaatacaaaaattagctgggcgtggtggcaggcgcctgcaatcccagctactctggaggctgaggcaggagaatcacttgaacctgggagggggaggttgcagtgagctgagatcatgccattgcactccagcctgggcaacagagcgagactccatctcagaaaaaaataaaaattaaaagaaggacagtaagacaaactgttgagggatttctggggaagctagtttcaaaaggcccaaccatcttgttctcttggcatgaggaataggagaagataacggaaagccactaggagacccttccagcccctatgccgtctttgattcccaaggagagctcctttttttaaatgttaatttgtttttaggaaatggaggaagagtactgccactttaagagaggaaaatgattacaagcaaaaatggctgtaaagtcctggcgttgtgcctgacagaatttggagcccagtggtattattttctatgtttattactccatgcagtagatttgttatggataaacagatttcttcctggaagttgtaacatgactatgcagttgctctataatccttgtacttattttttttaatcttgggaggcagagaaaagtcatatggcagatataaattagatctgaaactctacgtgtgggtattcacctattaccctccctcaaaataaaaaatgaagccacctaaagacaggatcctgggaaacacatgggcctagcatagctggattccactcggcagtgttggtgtagagtggccttaattaggctctgtgctcagatgttaatccttcctcaggaagcaaggtccagctgctcggacccttgtcgtaaatttcagggcctgaaaatccaaaagaagacacagggtagtcctcccgccggtgcccacctctgcgctgagcatgtagggttccatctcccgcctctgccctgcctcccccagggcagactgagcctctcccctccaggtgtcccagatgtttgcatcacagttcagccctggtccccatcagcacagcctgcctgggagaggccagcccagggtcagcagcgccattgcctcttgatttgggagctgatgctggaccccgcattgacgagacagagggggccatcttgtgcttctccagggctaggatgaaccatctggtcaaaacagaacagaaaccccaaagagctgttcatcggcgtctcactacatggtgaactgctactcacagggaaaagcgtggcgtttagacctgccctgtgatcacagggcctttgtgcatgctacatacacgtcagagacagaccatacccaaggatcacagagatggcacagcttcctgcccaccacactatcacagagctgttggtcccggggattgcgattcgtgtctttatttcttcattatttgtatagtcctgtgcttttccaggtttagagttattgcacgggactccccctcaagaaaagaatatcttaagtgagtctggggttgcagttggtccttaggatgtgaagcttagctgtgctttccacggtcagcagggtctgtcatggggctgaccttcccaatccatgcctttacctgaagctggtgcccatcagcctgggtcacagggtgtcttgcatctgtttcctctttactctgttgggccttgttggtgtttcatggtaattagccaattagcctgggtttcattctccgggagaggagacctgaacctgagcaggccaccctcaggctctggttaatccgtcacctccaggcaaagtgtaaagccttctctttgccacctcttctgagtggctgcggataccaagtggtcctttatgttcttacttttagggaagtatttagctcattcacaagtctttgtatctctactttgctacctcagagatagaaatatatgtctattatttgtgaaggcatgcttaaatacgatttttgtttgctagtgtacattttgcaattaatatttttgtattcatcttatatcttgcccatttgccaactgctgttatgatttttaataatttgtaggtgatttggggttttctatgaagacagtcatataccatgtgaatgtctttatcttcctttccaatctctcggtctttcattcccttatttttgacttaatacactgggtagcagggatggaaaaaagcagttacagtgggtgtccttgtcttgagcatcctgtaactgagtgttcaaaggtatgtttctgacatctcacccttaggattagtgacattgtggggtttagggatagattatctctgtccaaggtaatggagtcctcttctattcctcgttggctaaggagttttaatcatgcttctttctcttattgattttttttctttcttctggttgagaaattggacattctacttattttcttgcagaggtttaccacatggacttaatttacttaccaacatgtgaagtgagtccttacctctcccagtagagcagtacaaggccctatgacatcgtaactcccatgtcctcaccgctactctcacgttctccagcattttgacctttcccatggtagacattgtcattagcagtcatagtcggtattgtttttatttagttttttttttttgtttacatatttatcagttcatttgctcaccaacctgtctttcacaaacctgccttctaggatcttcctgaaatacatccttttttctttttttttttgagatgaagtctttccttgtcacccaggctggagtgcagtggcgtgatctcggctcactgcaacctccgcctcccaggttcaagtgattctcctgcctcagcctcctgagtagctggtattacaggtgcgtgccaccacacccagccatttttttttttttttcggtattttagtagagatggggttttgccatgttggccaggcaggtcttgaactcctgacctcagatgatccacctgcctcggcctcccaaagtgttgggatcacaggtgtgagccactgtgcctggccctgaagtatatcatttagtaatttccctagtggacgtctattggtaataagcacttttgggtgtttttgcagaaaaatatattttgttctttccttctttttctttttcttttctctttccctttcttttctcttcctttcttttcttctctgctcttttctgttttttctttcatagggtctcactctttcacccaggctagagtacattggtgtggtcacagctcactgcagcctccatctcccaggctcaagtgagcctcccacctcagcctcccaagtagctgggactacaggtgcaagccaccatgcctggctaattttcaaattttttgtagagatgaggtctcactgtgttgcccagaccagtcttgaactcctgggctcaagtgattctgccacctcacatcccaaagtgctgagttggcagacatgatcccttgcacctggcctgtgtttcactcttgttcttgagagagagtttatctgaatctcaagtctacactgttattttctcttgaggatatcattccactatctggcgactctcactgttactcttaagaagtctgtgatcgtcttgatatttgtttaagagcaatctgtctctagagacggggtctcaccatgttgaccaggctggtcttgaactcctgacaccttaggtgacccaccagcctcagcctcccaaagtgctgggattacaggcgtgagccaccatgcccagcctgtatcagtaatactttggatctaaatctgctgtcttgtttgcagtgtgttgggtgatctctggttttgagttcagatgtagttggtctccgtccatgggaagctttcctgtagagaagataccagaagccaagggagctctgagacctggggcctcccggctcctttccttgcaggattgccaggtgctggaccctgggtttatgtttcctatcttaggaccttatctgttgtgctaccaaaggtgtttgcccctcagggtagccttcacttttgcaggtttttagcactttaggctcacaattctagtttcacctcgtgtatttgatttggggaaggagaaggagggtcctcttgagatcatgcctcactgtggactgctgtgttgtgatgcagtcagcttggaggggaagccaggccccaggaacaagggagaaatgcttaagtgttggagaggagagcgacagcacaaacttcttacacagtaaactcagcgaagtgttaaaggtgggccagaaccaatttcacagtcaggcaagggctgaaagtagaaggaagtggaagggtacagattggcagatattgctaagcagggctgtgactgatgagatgaaagtgggaagagggagagggaggaatccaggtgattttgagattttatgattagaatagcattgtaatcattaacagaaatacagaaccccaagaggagcatttgaaaatgctagcaaatctatgtgatgcatgttaaatttgatatgaggacaaagtttttgagaaacatccacaggcattttaaaatccaaaactgattagatatatgaattggagatatatgtatgagaactgtacatgtctgtaggaagtgactctctaagcttcggaaggaaaggaacccctaagaaggagggaggaggaaggaggaacattaactaaacttgaagtttgccttcactaaaggccacatgcagaggaaccagggaggagaaagagaagcagtgatcagaaagctcgaaagagaactatagttgcacagtgagaagatggcaggcacgccacgggcacccctccttgccctggggtagacattgctagctgatcgcagatccttctccaggagcctggagccagccttggagatctcaacacaggattctctgcagctgctcaaagctgccttcattgagaacacaaatgcaagatagttctcagctatcttgcatcactcccataggatctcagagttgcaagggccctcccaatcatgtgtgagacgctgaattcccaccagtctcctctgaaagggccacattcaagggcctgaaacccccagggagcagaacccacaagccccatctctggatagttgtgagggggacagaatcttccacttgcagggtctccatcatttttttctgtcctgggttgactccagggcacccagaacaggtgtcatccctcttccatcagacagaagttccctgtgctcagagtccccagtgagcagtccctggcattgggctctctctgtggtgcctgctggccaccaccctgagtgatagagacaggaccacctccccaccattgtgggtgacacactcacagccttcactttcactgggagcctcgttctgggcctgccgttcactgcagtccttcagccttttcatatttgtagttgggaagcaaaatcttctcccaaacctcacctgctgttggggtccaagagaaggaattctagtcatgcatttgaccatttgagttgtcagttcagctaagagatcctcctctttttagaccttggggatggggataaaaccctagtttatctgctatcccccaaaactctttgctttcacaatttggtaagcagactttatatgtctttatccaagtcattgataaaacattgaatattgaatgaggcaagacagaggtaatagttccatggttgaccactgcagaccttctgctagtttatgctgcttagtaccccttagctgtgaatccatataactctattcacatctctttcattcaccctgataaaagccttgctcacatctgggtgagtcttcagggtgatcaagcatctcagaagactaagggggaaaatattgcaagatggtggtgcccatcagcaacgtcaggtgctccagaaagaggggggtcagtgagaaagaagactaagcacagcccatggcccctggctgttccttgatctgtaatcttacagagtgaggtttcaatcaggtggatgatggggaagcattattagaaaagagagggtggtaaagagctggatgcacgcgtgcacgtgtctgctttgcagattgtgtgagtgaaggatgaagaaaagaggtgatgatctctctcaaggatggagtgagatcaggaagtgagtgcaggaggtctgtagaagggggacatgaagtttgcaagagagtgaggaaaccatgccaaatccaggtccgcaagaaggtatgaggggaccaggtaaaggatgcagagagacgggaggaaaggaccaggagctgaaaggagagacagaaatgttgagtgacatagaagatactagacaagggaactttcttctgtccagtatacggagaagacaggtggtgggatagatttttaaagtgagtgatcggccaggtgcagtgacttatgcctgtaatcccagcatttggggaggccaacgtgggcggatcacctgaggtcaggagttcaagaccagcctggccaacatggtgaaaccctgtctccactaaaaatacaaaattagccggatatggtggcacatacctgtaatcccatcttctcgggaggctgaggcaggagaatcgcttgaacttgggaggcggaggttgcagtgagctgagatcatgccattgcactccagcctggacgacaggagcgaaactctgtctcaaaaaataaataaatagagtgagtgatgaagccatagaacagccactgtagggagcacatttagaaattagctcgaaatgggttctgatgttcctgtgaacacttacatgtatttgttcccctaagtagagtttgcatgcataggtaaaatttgtttacataattaatcgggcagagccaaactgcgctttagcaatttaatttgcaagttttgtctttgcatgagatactgagagtattacagtgcaagataccagatagcagctactgcgttgggatgaggcaaaaaatagagacgttcccttggagcttcattcagatttccattgtttttatcactttgtgttcagtcatctgcctgagtgtgtgcccgtcctcaccacgtagacacgtttagagggcacaggcttctcctgcatgctggaatcccttccacccagcccagtgcctagcacgttggggagggcagctgaggaccacagtgaccgagccctgcacccatacagtgtaatacaagctcagctcttagccttagttccagtgactgtagctcatgactggctagagccagacatttgagcaggaaagctttacaggggaccagttgtgcagaaatttaaccgggaagctaatggttgtaatttttttcactagaagatccaataaatgctgatcagagggagctttgatacatgcatttgaatttcacagattaaacaaagtgtgagcctgtcgagttgatctcataatgaaaaattgtcacatcccacctatgaattaccaagttttccttatgatctaactgtgagttatgtagttttttcataccttacctatctgttcactaggagagttttgcataaaatacatgaattggggcactatcctatgagaatctgtatggaaaaggttgtaaatcatagtactaggacttaaaagcccatggatcaagaagctggaccaagacccacagatgcaatggctcagccagtacttgcacgatatcattgtaagtcagccatggtgaaacctatgtgaaagttacagttacaatgattttttttttttttaatgaaatctccaagtccctgagtgtttaaggtcgttgttgaaggcatgacctgcagacaccctgacccccaccttcctcccccacccctctttccacagcaggtggagtgtttcattctgcataaatacacaggtggcgggggtggggtggtcatttgttctccaaattcaagagcccagtagattgggataaaattcctgagcaaccagaccctcccatcctgacctcttgtcaccagctctccagaaatcgggaaccagggtgactgagagcacaaaggacacccccataccgtgtgggccagctgagggcttcctccaaagactcttctctcccctcccactccagcccgtatcggtccctttcaaggacagggtgggtctcagtgccgacaccccaagcggggctaaccagccagggcctcaggcccgacctccactcagcacgtgcatcacagcactttcctgcagcccccagaatatgcccagggcacagtggctgtcagcacctagggagtcacagaccactgaggggctggtggaggccatgggccctctctggctgggtgctgtccccacacccctgggagtggggcttgggagcatcactgggctgctcaggtggaagggatctctcagccacaaagagggctgcatatccacccagccagaaaggagtggggaaagggtgagtggggtggcacgtcctcacgtcccaggctgcaggcgcattgtgaggaagggcctgggagagccagtctaggtgaggtcagtaagccgtgcttggaagctgggctagagggaccaagagtctggaagatcagaggtccgtgcagtagacatgagccagcccaatggccacgggctggtgacagagataagtaaagtggttggcaggcaggtaggtgaaagtcagtactaataatagttgctcgccaggggattataatgcagctagttcacaggccagggcccggaaacattgagtcaaatgagatgttgtgtctgaaaacctagttgaagatttcttaatgagggtctggtgcagtggctcacacttgtcactcagcactttgggaggccaaggagtgaggatcacttgagatcaggagtttgagaccagcctagggagacaccatctctacaaaaaatgtctaacaattggccaggtgtgatggtacacacctgtagtccgagctactcaggaggcgaaggcaggctcgcttgagcctgggaggtggaagatataatgagctgtgattgcaccatggcactccagcttggacaacaaagtgggactccatctcaaaaacagttcttcgtggttgtatgcaattagttatgctttttgccagtggtgcctcctcctttggcggggacttgggggccgggagtagggacaggaataatgaacagaggccgacgtggatctgtggagtgtctcctatggaccaggtcccaagtccgcatgggtctgtacacttcatggaactagcagaaaagcattagacagtcggtgcccttttccttcattttatgggttagaaaaaatgaacctcaggggagtccaggaacttgcccaaagacttagatgtggcaggtggggtcgcagggtatacccccaagttcctctcttcccattgcagacatggccccagagtagctaccaagtctggggcctgtctcagctgagatcctcctaaggcacgcgggatcccatgcactctccctgtctgaaaacgtgggaattgatgcctctcccacggtaacaggtcctctgccataaaagaacagaaccttcccgcgttcctctatccatggagtgtctgtggatctacgcgagtgcttagatagaaattaaccctgcagccggagattagcggccctaacttaattttcgtcccacagataaggatggtcagccatgagttacatggttattctcctaagttgctttgtgtgtgcaccacacagagacgctgacatcactcgttgatttcatctggccttgtgccctgagccttgattgaaacctggctaagtcatgctggccttaggaaccacatctggactgttgggaggtgcatggattcaaatctccgccgccgtggttgtccagtgccgtgcgcctcaccggtccatgcaggggcagctgaacccagaggcgcttctgtgacagagggcccgcagggggactgctgtctcataaaagctaaactcttcatcccacactctgtgtttcagaacaagaagaaaattttgagtttatcattgtgtccctcactggccaaacatggcactttgaagccacgacgtatgaggagcgggacgcctgggtccaagccatcgagagccagatcctggccagcctgcagtcgtgcgagagcagcaagaacaaggtgaggcccctggctgcccaaaaccaaggctggggctgctcagggggagtgcgggccccaagtaatgccccagggaggagaaaatagaggaccagtgtgaatgacaggacctagctattctttatgagcagaaagctcaataactaaaacgatcagaagcactttgtgtctataccatcatacatgagtattccagcctgaccgtgcttccctggcaggagagccaaggttaaatcttcagtctgtcagccaatcccagagggaatcttttggactcttgtggcttctgggtccacatttatttttgttttggacagaatacactcagaaaaaaagagagacggacttaaaagatgcactgttcaagtaaatgcccagaattcaaatcgacatcaagttggaaaaccgtctcttgttagggacataaatgaaaagtagatgggtctgtatgagcgtgcagggagtttgggaagataaagtttctattatctaaactgataaagcctggtatgtgttttattcaataattagaggtggtggtgcagctcttttagaatttgtccagcaggttttctggttctcaccagaaaacgccacccccaaatgtttctatattaaaaaaataatgagaggcaatttgttttttgtagttacttagctagaaaaggaaaaatattttaacctgtatttttttttcctttggagagagtctatctctgtcacctaggctggagtacagtggcacaatcttagctcactgcaacctccaagctcaagcaatcctcccacctcagcctcctgagttgctgggactacaggcctggcttgcttgcttatttatttgtatatttatttatgtaatatatattatttgtggaggtggggtttcatcacgttgcccaggctggtctcaaactcttgggctcaagcgatccacctgcctcagacacccagagtcctgggattacaggcatgagctaccacgcctggcttaacctgtgttctctaggctactgcccagtgatgttccttctacaaaagtcctttttcccatcaaggattgcttcagtttcattattttaatgtttgtttgtctttaacctctttgctgggacgtcttagacttttggagagcattttgatatttcagactatgatcaactagaaactaagagaaaggatgttacccaccgacctgcagtttcatttgtaaccatttaaagaaatttctgcctatgatttatgtgcagctttgtcactaaaaagagagtctgtctttcagaaagatgaagtgtcttattttattaccctctttaaccagggtaaaccagaccacagtcattattattataatgtaatttgcttccctttttaaaagatgttttatactcaaggtggggagaaccactgcctttcattccatacaccctggctttactgggtcacgtccacatgcatccatgatgtgcctcctgaaacgagcacagggtgctttggggccacctcaatgggaagcaacagcacacagcatcctccaagcgtgggcagctcattctgagaaggaaggcagggaggcaggctgtgttaccgaacagagaggcacaggttcctgccttcatggagaaatcacagtctttcacggcagactctgagcccctgccacctcgacctaattcaggaagatctgggatggtggcagcctttcccattccacaccttgccaggctcctcctgactcgtgtctcagctcatgcacacaccagccttagaatgctgccctcggccctcactaggcgcctgttctccagggaattgctcccttgggaggaggacgcgttgagcaaccaaaggtggccgactcagagctggtcatcgtgggcattggttgaacaggtgtgagggcataaaacatggaaatactgtccacaaggagtagcgggaggcaaaaatacaggcccagttgaccaccagctttatagtattttacctgccagtggataattgagagctgatacaggtataggcatagctagacagacagacaaaccaaccaaccacagaaatgatacaggtacacagagagacagaggcacatccctttgtatgtgtgtgtgtgtgtgtgtgtgtgtgtgtgatcacacacttgcattccagatgccagtgtaaactgtttaaacatattttgaatacttgggtatctaaccaaagggaattaaaattcaataacgcatgatgctaattagacagtagtgattaatacattataatttattatgtagcaagtaatatattatttcacatcaatttgatgagatgtttcaatttatgaagaattcttacgcaaaaatcaagcttattgtaactgtcctctgaaattgatcaatttttgctttaaccataatattaaatgcatacttaataaataagcctcaaaaacactacatatcagccagacacgatggttcacgcctgtactcctagtgctttgggaggctaaggtgggaggatcacttgaggcaaggagttcgagaccagcctggccaacatagggagaccattgtctctacaaaaaaatttttaaatagccaggtgcatggttcacacctgtagttccagctactcaggaggctgaggtgggaggaccacttgagcccaggagatggaggctgcagtgagctatgattgcactactccagcctgggcaacagagcaagaccctctctctaggtggggaaaaaggtacatatccagtacatatcctttcacttagaacttctacttccaggaatctattcttagtaaataatcatgagtgtgtaccaagacttagcaatcatatgttcttacagcatcgtttatgatagagaaaaattggaagcaacttaaatgtccatcaaagagaacttgataagtaggtcttcactaagtggaatgctatgcagccatttaaaatgatgatgtcagagagtatgtgacagcagtgagcaatgaacaagtttcgttaggctggaaagggcaggtttctatgcagcaatatgtattacgctggctttttaaagtacatatgtgtatgtagatgtgcttaaacaacaggctaaaagaacagacatcaaaatgttaataatgcttaactatggatggccgtatgattgtttattaattttatgttctttttcccctctctgtattttctaaacttgcttcaatgagcatgtatgtttttaaatcctttttaaagaagaccatagagccaggtgtggtggctcacacctgtaatctcaacactataggaggctaaggcaggaggatcacttgagcccacgagttcaaggctgcagtgagctatgatcacaccactgcaccccagcctcagccacagagcgagacactggctcaaaaaataataataataaataaataaataaaaataaagcaagccatcaagtgtaaggttaagaatcagcactcccagctatactcgtgtttctccctgcccccaccctggcgagtggctttgtcactgtggcaaccgagggtcttcagatgacatgtgcatctcccagggtgacgtgtggtatgaatggggttttctgacaaggaaccatgagatatgtcttacattgctgatgaagccctaaccctgggcttataaacggattatttctttctcattcttcttaccaagtagacatgtggctactgcccagaaggttacccatttaccttctccaggttaccatggtccatgcgtattcacagatgatccagaactctcctctttgctcatttctggcagagtccgtctcagctgatgagttaaaatgtgacatttcctccctccccccgccccatgcatgatgatttcttcttcagttatgctctttcccaaagacatcaaaacaagagtgattgtttagaaattaccctcgtcctacatttgctcccaatctgtttgatctttccctgatgttatcagtgatgtgcgtttctcccggggtgcttacgccttgtatttgtgtcttcctccgtgcccagtcccggctgacgagccagagcgaggccatggccctgcagtcgatccggaacatgcgcgggaactcccactgtgtggactgcgagacccagagtaagtgtgtgcggtggtagcaggggctggcgctgtgtagctggagaccacatggtcccactaggcccgggttgcaggggactcacatctgtcctgtttggcagataagagttaactgcttttaggaaattgagatattttgtttggattttaccttaacagagtgccttccacacaagcctcacccctggctgcagggtgcgtttctgtgagtctttccttgccttaggcatccgatgagcagcagtcatacctgaggtgcaaaggattcaaccccacacccacagcctgtgccaaatctaggaagcccaggaattcaagacgagcctgggcaacacagggagaacccgtctctacagaaaattaaaaattaactaggcgtggcagctggcttactttttgcttaatcagtgatcacttgttgattttttttttttttcataaaaatagaatataattggttcattcctgcctagagattcttgggtattgtttttttaaattcacaatcatatgttctgggttttgccatcaaatgatgtcttgtttttttttggtcttaaatccattacccactaaagcctctgattgaactgatagaagttgtaattactgctttgtgccatcgagtaccccagttttatttcatgatttccgttgtctaatccatactattactttccctttgaaaaagtcattttgttgttcataatcttgagagtagggacttattttcatggttgcagtcccagcccagagacagtattggagacattcagtaaatttcttcccttcagattttttttgttaagtagtgttttgaagagaaggaagttcagttcaaacaaggtaagaggtgctggtaccaggctgggtgctgcccaggagtcaaacgtgcatggcgtggtgggtcctgccatcctgaagcctgaaatgcactggacaaggcaccaacctgctgaccatggagctaagcgctggggagagccatcgggggcatgcggcggtcttgccacccatgcaggagctgtcgtgtcagcagggctctggagatgggcagggtttgtacagggaaggggccgaaggaatcactgtgagcaaagggagtggcttgaggagagcttctctgggtggttgtaggattagagatgctttttgggctggaaaaccagtagaagctagttggagtgtgagtgccaagtgaaactttttccagctttgttcttcatttgtaagcagagagacatcattggagttttagagcaggaaggagatggaccctgagctccacttggggagatggatctggccagaccattttgaacatactggaatagaggcaaagcagggaggaggccagccagggtcggcttggccgggaagggagacaggagcccaggactgctccagacaaaagggaaaggaagcgccccctccaagagtccactcagcagcatagcaggcaggggagagatcaaaagtctgtctgcggcctctctggaagcctgtcctgcgggtgagggaaggggttcttctccaggtatcttgaggttcttctttaaagtacctccttatgtttgaatgtttaagttttactttcaaatgtgtggtgaaatgaagttcgaagagagaagcagttatttgaagtgtgtttctatcaaaaagttttaaaagtaagagcttttttaaaagcacgaatctgagaaatattagaacatccattaaggaaaatgcctgcagttgtttccaccgtgcgtctgaaggtcgctttaaaaggaaagccatccgtggcttgcggggaccatgatacctggcaaatcggaggtcgcaggtcctgtctgagatgagcttgtgcatgtgagtgcggatggggggtgggaaagggaggccagtgcaggggaggtgtgggccagtttgttctgagcaagaccacctgagcagatggacagggacaaagggaaaaggcagagtttgacaattcaggagaaagaggcgataccaagcacgcatttgctaaatgtgtggtctgtgtcagcccggtgccaaaccctcccatgcgctgtcttttcattctgcaaccctagtagttggtgcccctgtgggccccacttaaaggggaggaattgaggagcctgaagggtcaagtcatttgtctgaggtcacagaaatagcaagtcccaaagcaggattcaaacccatctgttgtccagcctgctgtattttctcaagaatggaaaggctcagaagatgtagcacattggcaaggatttgttaagtaaaaatacccaattttggttaaagtaccgggataggtacagtgcccacactgatgatgaactgtaaacacctccatggggcctttcgacaatgtatataaaaagcttttgaagagtggatgcccttgactccagctgtatactccaggaactaaaccaatgggattgagtaaggcgggtgcagagatctgtctttccagatgttcatcacagtgctttacatggcaaaaaatcagaagcatcccaaatgtctaacaattgaagagcagttcatggtgatgtcttgtctttgctacctttaaaaatcatggaaaaagacttaattgagcctgggcacggtggctcacgcctgtaatcccagcactttgggaggccaaggtgggcggatcacctgaggtcaggagttcgagaccagcctggccagcgtggtgaaaccccatctctactaaaaatacaaaaattagccgggcatggtggcatatgcctgtaatcccggctacttgggaggctgaggcaggacttgaactcgagaggcggagtttgcagtgagccaagatcacgtcattgcactccatcctgggcgacagagtgagatttcgtctcaagggaaaaaaaaaaagtggggggggtgcttaattgagataaagaaacttcataatgtgttgtaaaatgaaaaaggggtatgacaatgagtctagatgaacctaacgagtatttacaggtatttagaggggaaagatctgtaaggctgcactctggaaggttagcaccagttgtgtctgagtggtagggtcttttgaggcttggggattttcatgcagcgtggaatttggaattgtggtaacagctccctgacccccagttcttgcagagaatgctctagaccgccaggagccccctctgtctgctcactgggcacatcccagagcactgtttccagagtggacgctgagcctctggagctttgggggtgcctgtctataaagggattctgagagccagtgaatttgggaaactcttaacaacgtccgactcccaggaagttgcagccttcggacacctgtgcttccggggagtactgctctgaagctacctgttcagcatggcccaacccagcatgtcccaggcccatcggacagtggggcctttgtttagggtgcctgttgcctgccttctgccaggaacatgccaaggaaagtccacacctgagggcccctgagaatcctagggcttgggaccctcagtggctctcaccagcaggtctgaccttcatggacaggccctgagaggcagctcaccgtttctgctgctttctctctgcccatccatgtcgcccatgaagccctggttggagctgaccgtgcgctggtccctcccaccctgctgcgtggacctcacaggtgcccctctctcctgggcctttctcatgtctagaatcctgccttatttccctttgtgaaccccaggcctgcacacaagaggggactggcacccaccactaccaccagatagctcaccacaacctacagtaggagcacatccaggctctcatctttagcttggcccacaaatagaacctccggtcccgcaacgtcgggtctccttcccattgtcgcctcttagtccttccctgacctccaggtttgaaatcacacacacacacacacacacatccctactccctgctgttctgccctgggggcttcctggctctggtgtatcctagaattttcttagctcttttctggtttgggcgggggcaggggcgggttgagatggggtctcgccctatagcccaggatggagtgcagcagaaagggtaggctgcctctcggggcctgtccatgattgcagcagtgcaatcatggctcactgcagccttgaactcttaggctccagcaatcctcccacctcagactcctgagcagctgtgactacatgtgcgtgccaccacgccgacctgattttttaaattttttgtagagaggtagtctcactatgctgcccaggctggtcttaaactcctggccttcggcgatcctcccccattgacctcccaaagtgctgggattataggcaggagccactgtgctgggcctagttttttttattttttcctgcttggtctgtcctcatagaatctacgtcctgcatttctgtgggcagggatttttctccgttttgttcactgctgtatccccagaagccagtgtgttaatattggttgaatacgtgaaggaacagatgtaattacagccaacacctaacactgtacttcccgtggggcagtcactgctctaagtgcctcgtagcttttaatccttctgacagccccttgaggatgggaattattagcctcatttctctggaggggagctgaggcccggagagcaagaggcttgcagaggacaaaggtggaaaggcagtgctagcaggtggcacgcacacaggtgtgagggcctggagagcaggcagggccgccctggggctgtgggaccagcggggcctgaagccaggtggaggggcaggagacagtgcagaggtctgagtccgtgccaggaggctgggatcagccacaggccgaggttctccacccaggccgagacacagcgaagtgtcccagttgggccttaaggcatctttcaaggaaattgcagtggtgatgcttagataccaacccttgccgatgagtcattctctgctggagcggaggcaaggttctcccctcagtcagccccagccttacctgtctctaagcagagggtggtgagcatggggccctggaacactgtgcccccgccccctgcaacattttgggtttcagagaattcggagtccggcacaggaatgtgtcccacgcatgaatgtcgtccttcagatctggacctgacagcctgggagctgctggggggaggtaggagggggtgcaccacggtctgaacgaggggccagcatgagtggcttctgtatctgcaacccacagcggcatggagggcggtggggtgggcataggaaccaaatcggaggttctggtaagagcttaggcaagtggctatggggatccagatgtgagtggagacagtgtgtcagagcactccccacagcactcggtgatgggctggatgctgggacataagggagcaggagaggtgctaggttttgagcggtggtgtgacatgatcagagatgccgtgttcagtggggccctggctgctgtgtgaagaggtctgcagggaagtgacgggcaaggccgcagacaggagccccttgcaccccagttgcgatgctggtgaggacgcccatgggagcataagttcgagaagaaagcgttggacttatgagaggttgagaaccttgtgattggctgtgggaatgatggaagaattaaggtggacccctggggtcccagcttgaatagctgggacaggagggacctggcagaagaatgcatttgcagagtggatgttgactaggagattctcccaactgaaatgtacgtggtcgttgcgtatataataattcaggagccaggaagaggtgttagtgcctgagtggtgattgaagtgtgggttgggttggcctgaataagactacacagtcagaagagatgaccccacaggagccctgaggtcagggaggaagagctgggaaagagatcacaacggagcaaccaggaaagtggggaaaaaatccagagaggtcgttgaccaaaaaggtatcagaagttagcactggcccagcacagtggctcatgcctgtaatcccaacactttgggaggcccaggcaggaggattgcttgagcccagtggttgaagcctgggcaacatagcaagaccccatctgtgcaaaaaatgtaagaagttagccaggcatggtgatgtgcacctgtagtcccagctactcgagaagctgaggcaggaggatcactggagcctaggagtttgaggctgcagtgagcagtgattgtgccaccacaagagaccctatctcaaaaaaagagtagtactcagtgttgtgaggaggggtggggcagtggccagcccacaagaggccgagtgaaacgttggccacaggggtcttttgggtttcgccctggaacaggctagtgactttggttgtgctgcgtccatggtcaggaggtagaggcctggttgtcagtgatccggaggtgcagaagcagagggagccagtggggaggtgggctgtgcagacacaaagggagaggcacaggcgaggaggggtccacgccagctgtgtgccatgcctccaccctccacagccccaggccagggcctcctctgtgtccccgctgccctcttccttctcgtgccacctgtgcattggttctgactgcgcttttcagcgttgagtctctgcatttctctgttctcttctgcttgggtttttttcatttgatgcataggtttccccttcccagtcagaacctctctgaggtcacagacctctcttctcacatttcttttttttttttttttttttttgaggagtctcgttctgtcacccaggctggagtgcagtggcaggatctccactcactgcaacctctgcctcctgagttcaagcgattctccagcctcagcctctcaaggagctgggattacaggtgccctccaccatacccaactaatttttttgtaatgttagtagagacagggtttcaccatgttggtcatgctggtctcgaactcctgacctcaggtgatcctcccatctcggcctcccaaagtgctgggattacaggcatgagccaccaccgcacccagcctcttctcacatttcttgtggtatctatcactgccttcttgcatatgtagtagatgttaaataaaggactggctttctgatttctgatcaactggcgtaaggctattgctggttacttgccatttataaaacaaaggatgtctccccagtgagtcaaatgtgacctaagctacttggtcttttgttgactcttcaggtgtgtccagagtaagcattgcctattcccaggtgagtaagccgtatttacttaacagtggtgaaagccagtgactatcaaggtcaaccctatctctgcacatcagctgtagattctagcgtgaagtcaacccgggcctgagttcttggtcttctgatgatgccagccagtttcacgcagtgagtgctccagttctggggtcccagtgctgctgtctgaatccatttcttgtcctgcacaatccttgcactagtccttggtctagtttcacagcccaaagcctgtcaccattcattctgcaagtcagcgttggttgcgctgcgtgataacctcaccaaagggccctgcccaccaacttgcctgcagtgcagttgcttcagtagctatagttaaataagatcactgaaaacgatatttcttcactgtagtgtacctctctctcatctttgaaatttgcaagcatgcccgttgtgtacctactggaaactttgatgtgccagtggctgcagaggtagcaatgaaggaatgaccagagtcacggtgtcacccagctgcccctcagcaccacttctccttccctctcagcagcagctgtccacagtggatgccgagtcacacgtgctttttcccacacaggtcagccctctcaaggtgaatgctgctgtgacatatgggaaagtgcatcttttctatccaaaccaacgctgtcaattatttattgtgcgggaaattccaaggctttggcttcagccaaatgtgttctgaagctactaccaacggccagtcatttgggacacctgaaacaggactgagcactggctagggagcattttttctcgccatggatgtggttctgtcgttgtgaagtttgactgattcgtcgccttgtgtttctaagaacggttggaatgatgcatgatggtctgattgcgtttagcgttctgttcctcttcccgtagatcccaactgggccagtttgaacttgggagccctcatgtgcatcgaatgctcagggatccaccggaatcttggcacccacctttcccgagtccgatctctggacctggatgactggccagtcgagctcatcaaggtgatgtcatccatcgggaacgagctagccaacagcgtctgggaagagagcagccaggggcggacgaaaccatcggtagactccacaaggtaggaactttggaagatgcctggctcccgacacgtttgccaacagttaggcaactggaagtgatcataatgacagccacggttgggaaggccctgataacctgtaggaattcgggaattccgattcatccggcataggaatgtctgtgtttaaagttggtcttgagcagacgtggataattcacactccttaattttttatgtttgtttttaggcctggggatttctctcccccctcttagaaatgtattaagcttctaaccttatgaatatattactttaattaatacatttctaataggcataagctgtgccgttaacactaattatgaatttttgatcctttaattttgttattcttatagcttggataagcatctgctctgtcgatcccccccccgcaccatcacacaaaagttatttttatggtaacaaaatctattttattttctaaaatatatctcaacacatttagtcaaccaagttcagcataatgtatgatgtaactcctcattaatgttaattgttatccagtgtaaaaaacgcatttattttgaggccatttagtttctcatttttcatttacagctattataaactgtttttgagtacacatgcatatttaatgttcctaaggggtgataaaatggagtgtcttctgagaaggcgtatggcatggaggcagaatagagcatttcatctccgtacttgtctaaagcaagtggcttccagggttgctcattttcacccacaataggaagtgggaggttgaggtttgctgtccgtgtttgcctctcaggtgtctgaagagatgaagggagaggagaggtctcccatcactggtactttttaggttcctctgatttgttttgctgctgatcagataaaatgaaagttcaagtggtaatctgtggttacgccacagaaaccggtttctactgcagagcagtaagaacgtgagaagcgttcgtggacttcagttcattaacactgaaaaatgaatttgtggtgccacctttggctcactggagagaatgaagctggtgtgttactcatctggctctccgtatgagggattctttggtagtggggaggacaggaaaggtgcaaagaacatatttgtttaaaattgcatggttttgatacgcgacctctttatgagttatgctctatagtgtagacaggggtaagtttcttacaaaccgaagaaattatgcactttaaaaagtatttatcttgatttgtttaatgctaccatagaaatcagctgggtcatcaactgtgaacaagcttaaaagatgaattcatgttttaatatctattttttcacagataatgataacattggaggaaacttgggtctgaaaatgaaaaatgattggaaattagattgagcttaatatatgaatgcagaaaacattgaaataagctggaaaaatctatgcatcttactgtttatatgtaaaagaagcacattcactatttttaatatcatgaattattagaaaagtttgtttatccatccattaaaatttagaaaccatttggaattattcgaagcaaagatacgggttcatgttttacctgataaatgttttataatttcatcttcattcataaatgaagattgtgtgtgcacaggtattttgtagttctaatttgcatccttgaattaagttcttgagtgcagagccctgtcttttttccagtgttacatacatcacatcattatattttagagacctattgcagagacttgcttactcccaagtgcagtggttgcagttaagtcccatcttttctttagtcacactggctttcctaaagagcaggccgagttgtaattcctctccaagactgtggtgttggtgatgtggttctgtgctgttgctgaaggtaactgtggaatttctaagttccctttgcacctaagaagataaacacatacgagaactgaatatttctttgtgcctgtagtaattttcctggggagttttgttttcagtgaaaatcagcaaataatcattgcacactttctcgtagaaaagcaacggtgagtgatgattgcagttccctggtgattggtgaaggctctcagggctgcctgaggatgccagggctcgggagggtgcattctgggaggtgtcactggagaaatggcatctgagctggactctgaaatagggggtgattcccagggccagggccaggggaccaggtgggaaggcgggctggagggtgggagtggcctcggtggatgcaggctcggccgggcctgtggggaggtgtgcctgtcggcgagtacagcaccgtggacgggagcctcccatgaatgaggaggagcaggaatgggggaggcccaaagagcagaagcaggaagggcctctgagccagggctggcaccttaaaagcgaccctgggggcaggggagaggggaagggtttgtctattcatgggttctgtctgtcccacctgttcccaagaggactaaaggcagccagcaaggtctgtgtcccttcccgctggaaggccagggtcctggtggagcatgcgggaagccttaactacactgtccaaagcaaaacacacccagcccgataacagagtagaaattcagactcccaccaccttcaccacctcctgcacgtcccctcaatagaaaatggaaaagtgaaagtcggggctggaatctccgcaagccggtctgtccatgacgtgagaagattctgcctttcgaagccacccccgctccctctgccccactccgcccctcctggtctctctgcagaacctacgattgttagtagaaacagctggaaggttcttttaatgtggccctgaggtaataccaaaaagaaatattttaataaatttttctctctatcaaaggaaaagccaagtgcaatatatttggtgtaattctttgaaaaagggcccagctgttttcccaaggagctctggtccattccatcttgtgcagaagattcattctgacagtggaatataattagaaatgcgtcgttcagcctgcccccacccccaaacacacaaacacacacagattcaagaccatggggaagtagaacacagcagatcttcctccaaagagaccgccgcacactggagtcacctattcgtgcggccagttaggacagcaggcgccctggacagccggcctctgctgtgtccctgcacccctgattagggcagcttcggacggcttataattggttccagttaatctctgccgccctgagaactgccgttcaaacttgagcagcatcatgatcaatggaagctgacggcggctgaagcagtattgacttcccattcctaaacaggggaatcattagtcaagaaaagcatcttttaattactcccaggaagaaaaaaaaaatctttttggatggattctgcaacaactgccattttttcccagtgcattcgatattaaatttattgtcgcaggaggggagaggatgccctttgtccccctctgtaatgggggtttaatttggaaaaagaagcacgttagaaaacagagcaatgctacaacaattaactacatctggggtagcatcagaattcccctctctaattgctattgataccatttaagcacacacttaaaatatcgattttaagtggggatgttgaagtggtggtgaagtagtaacagtggacagaactaactaggttttaggggtttaagaagggagccgtcagctgtgtgtaggacaggacttcgtaacacccggcttgtgcgtgtgtgcggtaccataacgtagcgtgttgtagggcgtcgagcagctgggccgggggccaccagccaggcggggctctgggttccagtgttagaggtacatggtgttactgtaaggagaagttgccaagctccttggtgaccctttcaaaggcaagagtaataagctcagaggtgaagatgttaaaacagtcgtgcgaacgtctcctgcatgaatgaatgattgaacgagtaaatgagtgaaagcgggaactcgtcatcatggaacacatgtcaggtgctcttgctacttcggggccttggaattcctcatgtgagtgaaaccggggctttgacgtttgcagcaccagcaaagccgtctcagtaaacccgtccacgcacatcctctctccctcgcggtacagcagtgtttccggggctgcacggcagcgccctggcccgttgttctttattgttgtccccattgcacttaaaaacatttgggattggctgcagtgcaagtgatttcctagcaggacggagcagagccctctggcgccacattcctcttggcagaagcctcgctctgcgtggcactgcatctccccatctttgtgtcctggtgtcaaagcatttggcccccaaggccctgcagggactcgctgctatttgcatttcagtgcaggtagcctgtttacttggcggcttaggagcctgctgatttgggccaggaaatcaaaggaacctggaagtggagaatagtgttttcaattccgtgaaagagctcttgagaggcgctttaagcgcaactgaaatcacccattacctctttgatgccacttggaagggaaccgagtttgctgatttagtacgtattcttttcccttttttagcatcctttttctttttcttccccccattatttgtaagttcacctctgtgcctaaactcccttcttgtctttaacctataaaaagatgtcgccttcgataggaagatttggggccagacatcagaaatccacgtgggagagactggccgtacacttccagatggaacaagtctgcccagtgatgtgagttccatctctttttgattctggaactccactttcatcttatttatgcacatggagatattgataaaggggaaatgtatccaaactgaaaataattggatccctacagctaactctgagatattaaaagcagtaccacttggctgtgtctttgtcttgttaggtttgatcataagatcacaatgtagtaatctcgggctcaaatttctggcataaagatgcactgttccaaatgtggcctcagggaacacgactgcccacacagccccaggattgtctcatcttattatttttcaacagttcttggcctgctgaggtcaatgttttgtctcttttgagtgttcctctatgcttgacaccttttcctattttctttcttaaaaaaaaaaaaaaaaaaagggagggggagaaaggagaaaaaaaataaaaaaaggactttgccgcgatgaccagagtccatctgcagttgggtggcatctgctccccacatgtcactttcctcattaacaagcaattgaattaattaaatgctactcagaacacgcataacaagctaccggcagtgtccaaattagcactgataatcaaggatgatttcctttattatcctgctaagtggtgtgcagactctgatctccctgtctgccctcatctatttacatacccccagctcctgcctttggaagcggaggttatcttacctagttaatttgccacgatcaccgagcatggcggattgatgccctgcccctgccgccactgccgggcccgggccccctccccggctgccctcccccagccccagcctttgtatctcaagctcactgataaattaaaggccacccctgtggtctctcaagtgagtaatagaggcagaaatttcattttgcaactggctgatttaatgatccaaagggtaattaatggcctgattatcttaatgttaaatatgtccggcagcaattactgtgacctcccgcttgtcaaggtccgggctgtgctcttctttcaattaagttctctggggcttaatggtatgaataaactcctctgattctatcatcccggatgcagagggttcagggagctgggggctcgtttggagttttaatcagcctgtcttctactccggcgatcagagttaacaattatagcaaggacagtttaactttcttcttcgccgtgcagacccccctacatgtacacacatgcacacttttgtgtgtggctttatgtgccttgttttcatgtgtttctttcagtgctctcagggagaattctgtttgtggaggaagctgctgtgctctgtgagcctcgtctcttccaatataaattatcatgtgaacgctgtggtttttctatttgacaggcttaattaattggcaggagcccccgaaaatgacagtaccactaattgcaactcaaagtgaatttctgtcaccgcggcgtgcttgtcagtgggcctgccctggccccagccgcagagcgggtccaccctcccagtttccccgtccaggcagggactgtgccctgctcaagccacgacagtggcagccttctccgaggagccgtgggtttgcaggcacaccgtctgctggcaggagtgacatttactaccaataaagtttatacatcctcggctatgcaaacgcaacagctgctcagggacctcagcccttacttaagatattttagcaacttctcttagcaagccaacttggaatcagactgagagaaccataactcacttagccacccttcatgactggatggtcctcattagcacactgctaaatatgcttcagtttactagagctcagggcccggatcagaaatattctgctataaatattaagccaattaggaaaatgtacaaatgagaagtacgttaacactgcctttaaaataatacctacagattacagttgacaacagatagagcaatgcatctagtgaacctccaccagggagcttggtgggaatccaggcaagctctccataaagactggctctaattataagaaaggtgattctaagaagattctccatgaggttaagtataatgggatctgctttttcaaggataactatacttgcatttgcctttgaaccagacagacagaatggtgctctcggtttatcatgccgcctgccacacaggaaccccagttatttgtttgatcctgcaagaaaccagtgtgtgcttggagccggctttgctaccgcagagctgtctagggttgaaaatccttatcatttacgttctgaaatacggccgtcgtgacaattaaggagtttctgatgcttaagaatttttactgcccctggcagatgagaaggcaagtcatcagcaggcagcaactggcttccaggtgccctgaccacgttcaagcctgtgtctacttgtgggagtgtatgaaggaatggaatgggaagattaacctttttaggcttgaattatataacatgggccaataaatatggcctctattttgattcctccagcagtcaagcattttccaaagggccctgtctttcagtcgtgttttgcttattttgcaccagagactctctgtcttctagtgaacttttctctttcttcttcttaatgaagaggagggagacaaaaacatggccggagcacacagcgccctgtgtgcttggattatccccattcccagacgtgtgccagggtcacatgggagcgcaggtcagactgcaggcaccaagatctgactccagatgccgctctgcagtcctgctgctgctcctgttccttttctgccaaatccacgtcagtagcggcattgggagaaccgccatgtttagcagcaccactcccactcgcccctggtcagtttctatctcagtagccatcgtgtgtcaaacttactaaatgagtagtgcaaacatattatgtaactacagtgtctttccacttcacagcagcttcacttatagtaatataagtaatcataaagcctcttccattttagtttacattcatttagctgacctgacttttttggtggcgtctctctctgtcgcccaggctagagtgcagtggtgcaatctcggctcactgcaacctctgtctcctaggttcaagtgattctcctacctcaacctcccaggtatctgggattacaggcacgtgccaacacacccaattaatttttgtatttttagtagagacagggtttcaacgtgttagccaggctggtctcaaactcctgacctcaggtgatttgcctgccttggccccccaaagtgctgggattacaggcatgagccactgtgcctggccaaaactcgaccttacaagtcacacagccatgattctaaagtcttaattctcttccatcagtgctaatcctaagagcttccacagaaaacagcactgagaactgtaaaatgttgagatccacccacacaagtgcagggttagagcccccccctcaacccccgtgtttcacgtaaccacatcctgctcatgtccctgacccaacactgcgttttgggaatataaagcctgtattgcagagacctcacaatcatatttattatctgcatggtacaatatggagccatgtctcaggccatagagttcctggttctggtttcatggccagcatcttctgccattttaattttaaaaacagggtaattcctcatttctaagaagagactagtcatttttccacccacttaattatgtagagttagtgctaaaagaaaataatatttatgaagtttcctgggcttcctttttatccagaagatacaatcagctttgaggcctgggtcatgcatactagcagtgagagggacaggtggtccatgccctccccgggggttgtggagggcctgctgatatagaagatgtggcccatgtttattttgctttgtatgtatataatggtttattgcagcatcagtatcacatggaaaggtatattcttgagccccacccaagcctacccagtcagcatccctagggggtagggtccagtggtgtgttttaactctctaggtaattcttatgcacattaaagtttgagacactctggtctgcactaagtagtaaaaataaaagtccacaatcttgcctgtgaactcactgtgttaatccaagtccctggacttcattcctcacttctttagacccaggtcttctgttttcttcctttaccagactgttgtctggcttagcatatccagtatatcccagcagatgttacagccagagagcatctacaagaggattagactctgtgatcaggtggcactgaatgcaaggaaggcaaggttggttcgacacgcaaaaatcaatcaatgtgatataccacattaatacagtaaagagagaagaaaacataatcttttcaagggatacagaaaatacatttgacaaaaccacgtgccctttcatggtaacaaacactcagcaaactagaaataaaaggaaacttgctgaacctgataaaggacatctctaaaaaacccacagctaacattgtactttatggtgaaatactgcaggcttttcccctaagatcacaaacaagacaagaatgtcaccagatctgttcagcattatactggaggttcaagccagggaattaggcaagaagaagaaaccaaaagcatccagatttgaaaagaagtaaaactacctccatttccagatgacataatcttttatgtggaaaatcctaaggaacccataagaaacatgttaagcaaaattgaaggatacaagatcaatgtgcaaaactcttagctggccatggtggcacagttctgtagtcccagctactcaagaggctcaggcaggaggattgcttgagcccaggatttcaaggctgcagtgggccacaatcgcaccaccactttccagcctggggaacagagcaagactctgactcttaaaaaatcaaaaaggccaggtgcagtggctcataccttaaatcccaatgttttgggaggctgaggctggaggattacttgaagctaggagttcaagaccagcctgggcaaaataacaagaccgtatctttaaaaaaaaaaaaaattctattgtatttctttctgtacactagcagtggacaatcaaaataaaattaaggacagttccatttacaaatagcatcaaaaagagtaatatacttagaaataaattacctgtacactgaaaactacaaagcatcatcgaaagaaattaaagaagacctaagtaaatgaaaagacatcatgttcacggattggaatatggcagtactcttcaaatcgatgtacagagtcggcaaaatcactttcagaatctcagctgcctgtttttttcccagaaatttgacagctaatcctaaaattcatatggcacagtaagagaccgtcaaatatcaaaacggtcttgaaaaaagaatgaagaagttggagatctcacactttctgatttcagaatttactgcaaaagcatggtgatccaagcctgtgtgatattggtgtaaaaatagacacacacgtcaatgaagcggaatcgagagtccagaaatgagccccttcatcggtgggcagttgatttccaaaaaagatgccaagacatcttccccatcaatggggaaggaatagtctttttaggaagtggtgctgggacaactggatatccacttgtgaaagaatgaagttagactcttatctaatgctatatataaaaattaactccaacacctgtaatcctagcactttgggaggctgaggcgggtggacacttgaggtcaggagttcaagaccagcctggccaacatggtgaaaccccgtctctcctaaaaatagaaaaattagctgggcatggtggcatgcacctgtaacgccagctacttgggaggctgaggtagaataatcacttgaacccaagagttggaggttgcagtgagccgagatcgcaccactgcactccagcctgggtgacagagcaagacttcgtctcaaaacacacacacacacacaaattaattccagattgatcaaagccttgagtgcaaaaactgaaactataaaacttttagaagaaaatacggggtaaatctttgtgactttagattaggcagtggtttcttagatatgatacctaaagtgcaagcaataaaagaaaaaatagataaattgaatattagccaaattaaaaattttagtgcttcaaagggcagtgtcagaaaagtaaaaatgcacagaatgggtgaaaacatttgaaaattaaatatccagtagggatctggtatccagaatatataaagaacggttacaggtgggcatgatggctcatgcctgtaaccctagcactttgggaggccaaggtgggaggatcactggagcccaggagtttgacaccagtctggacagcatagggataccccatctctataaaaaataaaaaacattagccaggtatggtgacgtgcacctgtggtcataggtaagctactcaggcggctgaggcaggaggattgcttgagcctaggaggtcaaggctgcagtgagccgtgatcgcaccactgcactccagcctgggccgcagagtgagaccccatctcaaaaaaataaaaatttaaattaaaaaaaagaatacttaaaactcaacaatagaaggtagattgtccaatttaaacatgggcaaagagctgggcatggaggctcatgcccgtaatcccagcatgtggggaggctgaggcaggaggatcacttgaggccagcatctcaagacctgcctgatcaacatagtgagaccccacctctacaaaaacttttaaaaattagctgggcacagtggggcacacctgtagtcccagctacctgggaggctgaggtgggaggacctcttgagcccaggagtttgaggttgcagtgagccgttatcacgtcactccactctagcctggataacagaacaagacctcgtctgaaaaataaaataagtaaaaaataaaaatgggctaagactctaaatagacatttctccagaaaatataaaaatggccagtaaatacatgaaaagatgcctaatgtcattactttttagggaaatgcagatcacccttgagcccccaccgcacgtgctcttggacggtcgtggcaagtgttggtgaggaacgtggagacactggtgcagccacttgggaagatagtctggcacttcctcgaaaagttaaacctagagttaccgtatgacccagccattcctcccccaggtctatacctaagataaatgaaaacacttgtccacacaaaaatgtacacctgagtgttcacagcaacatcattcataatagccaaaaagtgaaagtaacccaggtgtccctctgtggatgaatgggtgaacaaaacatggtctgtccgtacaccagaacgtgattctgccatgggaaggagtgaagtgtggatacaggttgtaacgtgggtgaacctcgaagacatgatgctaaaggaaaggaagcaggcacagaaggccacaccgtgtaccattccatctgtctgatggcgaaaacaggcacctccatagtaatgcaaagtagattcctgcttgccaggtgcaggggagggaggggcagtggcgtatacggagtgattgcctaatgagtacgaaacttcttttggagacaacgaaaatgatctggatttacatagtagtgatggttgtacatccttgcaaatatactaaaaaccactgagttgtacacttttaaagtgtgaattttatggtatataaattatgtcaattttgaaaaaaaaaaaaaaggaatttccaaaggaaaacagatgagccagggcgttccacaaagagcagctggagcaaaggtgcaggcgtacaggaacgcatgctgggtggcgggggcctgggtgcgggccgagggctggcgtggctgcccctcctcaggcctggggagtagagctctgagcaggatgtgcactgcagccaaattcctgccctgcggacggcccacaggggagcgagagcaggtggaaggtggtgcctatgtccaggggagcaagtgagcctgaatcagcgatcatcaccaccagatactgggagtccctgggagagatcaggcacttgacaagccctgcctcttggaatccgcacagcaaaccaatgccattctttccttttcctgggctaggaaactcaggcctgtgtctccctgagcctgtgaatgcaggacgggccagaacccaccccagatctgacctccctagaggaagccatggccagaggggaggggagggaggcagagccaggctggtatgggattctaggagcatactcaggactcgtattttgttgttgttgttgttgttgttgttacttttcatttattttcatgtattttttttagaaacagaatctcactctatcacacaggcttgaatgcagtggcatgatcatagcttactgcaaccccagactcccaggctcaagcaatcctacctagtcagcctcccaagtagctgggactacagccacatgcctccacactcagctattttgtttgtttgtttgtttgtttttgtttgtttgtttgagatggaatctcactctgtcacccaggctggagtgcagtggagcaatcttggctcactgcaacctccacctcctgggttcaagcaaattctctgcctcagcctcccaagtagctgggattacaggctcccgccaccttacccagctaatgtttgtatttttagtagagatggggtttcaccatcttggccaggctggtcttgaactcctgacctcatgatccacccaccttggcctcccagagtgctgggattacaagtatgagccaccgtgcctggccatcagctatttttttaagagatgggggtctcactatgttgcccaggcagggatcctggcctccagtgatcctcctgccttggcctcccaaagcgctgggattacaggggtgaggcactgcgccccgctgtactcaggacttttattttttttgagccagagtcttgctcttttgcccaggctacagtgcagtggcacaatctcagctcactgcaacctccacctcccaggttcaagtgattctcctgcctcagcctcccacctgggattacaggtacccgccaccattaatggctaatttttgtatatttagtagagacggggtttcaccatgttggccaagctggtcttgaacttctgacccccaagtgatccactggcctcgacctcccaaagtgctgggattacaggcatgagccaccaggaatggtggctcttaaccaaagtgaatgtggggtgtgggaaagacaagcatccatgttgatgtttagttttctttcttgggccattgggaggatgatgaggcctttaaacaacaagcaaaacacacaaaaggtaattccagttgtaaaatcttgacgagattattttcatgttaagaaaggtaaaagttgcacacatttgtgctggtgatttcgacaagattaattgattgatttctaggctggccacccagtgtagcagaggcccagcctcacctttgcagtcttggctttgtgactgggtcactgggctttagaggcaaactgtccgaggccagtgggacaaagcaagccactcctggctgcagagatctgacttcacagaattacttgaggcccagaaagggagaacagcagtgacaataccattaaagcttcaaataattaaatgtcatttataactgatacaaaatttcatcaaccaggggtctggaagatgaacattatctggagcacacatcactcaattttagggacccactcatataaaaagcatctctgatgtacgtgatctaatacaaatgaccctggaggatacatacataatcatgatgacttacctataagtctctcctcaaggacctcgaagagctgccacaatgtcttcatgctgatccttgccatcttaatgaaattaggagataactgtttaaaatcagagaagatgacacccagacaggaaaagtgacttgcctataattaacccagtgacttggaccaagccagaattagcctgtgaacctgtcacccagagactcctgagagaagccaacagcgtggcttaggagcatggagttatggctgcaaatgcctctagtagctttcagcctcaaatgctaaagcccaggacactcctacacgtgaaaatttgctctgccgtggctcgcgcctgtaatcccagcactttggggaggccgaggtgggtggatcacttgaggttgggagtttgagacctgcctggccaacatgttgaaatcctgtctgtactaaaaaaaaaatacaaaaattggccaggcatagtggcacacatctgtaatcccagctactcaggaggctgaggcaggagactcacttgaactcgggaggcggaggttgcagtgagctgagatcgtgccactgcactgcattctggacaacagagcgggactccgtcttaaaactaaataaataacaaaatgccagtagcactcctgctgaggagcatggaaagagccctccaaaaattaaacccacactgctgcagagggacccaggatcagctcccaccagctgattgctggtatcctttaaacagcacgtgaaaagacctggaagagcctcgcacccttcctcggagaattctttgggggtgtggaaggaatgaactgagaaagaggaatatgttttcattctaaattgccaaactatacctttctaaacacataaaatgaaaacaagaataatcacctgttctgtaatattccagaggagccatagtagatactcaataaatatttgagagattgtgttactttttcattgttttctttccaaaaactaaagttagggtcatgatatatgactgataaaaaaaggaagtggaagtaagtggccaggcaaaggctccatggagcatcagcctgactgatactgctggagaggtgaggcagatacagacagacagcagcttatcggaggccggaaggcttacgtgctgccttcatcacgggcttcgtcaaaacctctgggtttcaacacagcattggaaaaggctctgttcctgacgttcccacttgtggttttgaaattgccaagccaagggaagttcaataacttattcgcacacaggggcacgtccattggctttgagttaggagtgtcggtggtggtgtcttcagctcctcgggcccctattgttgctgcctgcttgtgactctgcattcgactggatgcattttatttctgaaatacactcgccccgtgggcggttttcatctggctgtgaagcagccatcaaagaaagctcccctaaatgttctgttcgcaggcagcctagaaaccttttctgacatgttgctaacactccatcaggctctctctggaataggaacagtgttcggccagcctgtggacagttgggtgattatcgaaagggaggcccacaggggctgcagagcttagaaaaaggaacgcttttaaatgtgcatatttacaacaaaatcctgcttcctaaggcaagcgagtggggtcccattgttgccggaacacatcatctccatcatccttttaaaaatggggctcttctgacagctgcctcctgctgggttgtggagctctgtggcacccagttgggcttcagggcaaatgaagccttaggacccaccatctagcactgctttcagcaaagccttccagagtccttccttctgtccagcagcttccttatcagatgggaaaatccttgcatcattaaacgtgacaagtcactgtgcttgtccccagctgttgtgctgagattctagggagtagctgtctgatggccagggtggcactgtggtcggcatgtgtcagcaacatcagagtcactactcgtggccctcagtgggatgtgccctcagtaatggcttgcccatgtgtcctgaaaacccttcttccattgcttgtcccactagggccaccctgcccaagctctggaggggacactcactgtgcaaatccgtttactgacacatgggcctcaggaagccctgatttgcaggctgcagtgaatgcacaaattactagaattttggtttttgttttttattgtttttgtttttgttttttgagacagagtctcactctgtcgccctagctggtgcagtggcacaatctcagttcactgcaacctctgcctcctggactcaagtgattctcctgcctcagcctcctgagtagttgggactacagacacctgccaccacgcccagttcattttcgtatttttagtagagatggggtttcgccatgttggccagactggtgtcaaattcctgagctcaattgatccacccgcgtcggcctcccaaagtgctgggattacaggcgcgggacactgtgcccagccaaattactagaattttgaatacctcattcttaaggtcccagtatcatgccattcttttgagattgttgagataaatcatgaactcttaaaatggttggattatccagagcaagtggtatattattcttttagctttttaaaaaatttatattggggtataatttgcatactgcattacacacattttgagtatacaatcaattcagttggttttgataactgcataggtctatcaataatattcctatcaccccaggaacttcccctgtcccccctcctgtttattctccctgttcagaagcagccatgaatctgacatctgtcaggataggttagttttgcctcttagaaaattcatggaaatggaattatatggtatatacgtttttgtgcctggctactatcactcaaaaatgtaattgaaaagaattgtttatctaccaatgatacattttccccatgtaagggaatatctgaaaatgtcttcttcaccaaccaattttttttttttttatcactgagacctaagagtttactgtaagtcagatgtactctgtgtagatctgcttctggagttggggttcagagttccaactcaggtcagactggcagcatccaacctggtctttaccactggcttgctgtgtgacccgggctggatgttcaccctcactgtgcctcagtttcccattctgccaagtgaggggtaagtgtagtacctgcctcatcaggatgatttcaagaattaaatgaacaatatatataacacaatgctgaacacctaatcttctcaatagagggctaagttctaaatagaagtcatctattagtttttttaaggaaaaatcactacgcttttaaaggagaaaaacttgtaagagtgagacactctgagcaagttcagaaacatcgttaaaaattataatgaaaaatactatgtctacctgtcatatttgctataatgctaaatcaggtgggcaggacaagtcttcagtatctacagaaatgcctagtattgagctagcccatttgagaaagtaaagatgtttctggaaagacaatctgattattttcttaggaagtagtgtgaaataatctatgttactatgcgctagatgatgtggccaagactgggagtaacacgtattggaagaagagaatggggtcctgtcttttctctgttctggggaagaaacctcatctcttaacagacgttccgcacatcctttccagtatgccgtgttcacgtgaggtgagacgaggaagagcgagtgtttttcacaagagtctcatggaatccaaagagtaatgaccgttcctggatgttttgcatcatgttccaaatcatagccaccgggctgtcagggtcagccatccgtcctgtgctatctcatctggcaaagagaaggacatgttgtgtatgttcctgtaagacagagtggctcttactaaaatcaaataattggctgggtgtggtggctcacacctgtaatcccagcactttgggaagccaaggcaggcagattgcctgaagtcagaagtttgagaccagcccggccaacatggtgaaaccccatctctgctaaaaatacgaaatttagctgggcgttgtggcatgtgcctgtaatcccagctactcggaggctgaggcaggagaattgcttgaatccaggaggcagaggttgtagtgagccaagatcacgccactacactccagcctgggcaacagagcaagactccatctcaaaaaaacaaaaaatcaaatagctagcgcagatcactgtgaaacatctgatggtaaaaaacaaaggtcgttttgttccataatataataacccttcctgttggccaactccctctcctctcctctggcactgctggtaagagtgaaagttggggaaaccttcctggaaggaacttggcaatatgtgtcaatagcctttaaaatgatatgctttttgacctagcagttcttctcttaacatttatcctaggccgggcgcggtggctcacgcctgtaatcccagcactttcggaggccgaggcgggcggatcacgaggtcaggagatcgagaccatcctggctaacacggtgaaaccccgtctctactaaaaatacaaaaaattagccgggcgtggtggcgggcgcctgtagtcccagctactcaggaggctgaggcaggagaatggcgtgaacccgagaggcagagcttgcagtgagccaagatcgcgccactgcactccagcctgggcgacagcgagactccgtctcaaaaaaaaaaaaaaaaaaaaaaaatttatcctaaaaactgaaggatgtaggctaggcatggtggttcacgcctgtaatcctagcactttgggaggccaaggcaggcggatcatgaggtcaggagatcgagaccatcctggtcaacatggtgaaaccccgtctctactaaaaatacaaaaattagctgggcatggtggtgcatgcctgtaatccaaactgctcgggaggctgaggcagaagaatcacttgaacccgcgaggtgaaggttgcagtgagccgagatcacgctagtgcgctccagcctgggcaacagcgtgagactccatcttaaaaaaaaaaaaagaaagaaattttaaataaagcaaaaattcaaaataggcaattaaataaattattactttagtatgcaagtaatgcatatagttacattatataaaatacatgattttgtcgtgtacacgtgacaatgcaatgtaaatatacatacgttatgatgtataattgaatatatatcataaaatcttacatttcatataatgtaatgaattatatataatgtataaattttacatggtaagtatatgcattatttatacatatgagcatagcacatgatataaacagtgcaactttgtttttctttcgatacagaggctccctctgtcacccagtctggagtgcagtggcacaacctcggctcactgcaacctctgcctcccaggttcaagtgattctcctgcctcagcctcccaaatagctgggattacaggcacacgccaccacgcctggctaacttttgtatttttagtagagacggggtttcaccatgttggccaggctggtcttgaacgcctgacctcaagtgatctgcccacctcagcctcccaaagtgctgggattaccggagtgagccactgcacctggaaatgtgatgatgcaggtgaaaatgtgattacatggggagatagttatggtattctgttaaaatattgtgtaccccaaattgttaattgtgacactttctctaggggatagggttctgatttattcttatttattgcttatctttattttctaattttctgccattttaaaaatttggttagatttttaataagctatctatgacatcagagccgtagagggccgggaatgtgtcattgacatgaatggcatggcttgcctttcacccagtgtgacagtggtggctgacgccacccaagggcacactggtccactgtcagtggcgcctagagccctggcatctgctggctgtggcgctgtatgagagcattcgtgttaggagtaccactggggtgtgacccccacattgctcccgaaagctgtgcagccatgacccgcaccctccccagactcagtttcctcctctggaagtggacctgctagttctccttttgttcccagtttgctcttggtttggatttggcatcagggcgagtggttaggggcagcgtccggacaccatgctcacctacccagatgaatgagaaagagcagcattgaaatcctcaggctaattctgaaggactcttagcagctgaggagcatctataaagttatgagttcctctgaagttttagtgaaattacggggctactctgtggcctaccacttccacccctaggcgtatccacaagagaaatgaaacctgcgttcacacagaaacttgcacataaatgttcatggcagcatcgttcctattagctacacagtggaaacaaactaaaatgtctatccaccaatgaatgcataaacaaaatatggtgtatccacacaatggaatattgttcagccacagaaaagactaaagcattgatgtatactacaacgtaaatgcaccttcaacattatgaagccagtcacaaaagacttcataccgtgtaattacatgaaatggccagaataggccaatccatacggacagaaagtggattggggtggccctgggccggggcaggggcggggaggcatcagggggatgggcagtgcttgctcatgggagtgggacttctttttggggtgatcaaaatgtccccaaattggttgtcatggtggttccatgactctgaaaaatgctaaaaccattgaatggtgcatttggagatgagtgaatcgtagggtatgtgaattacatctcagcaaagctgttagaaaaaagaaaagatatgccacattttaagtggtgggaaaaatcaaagagagcatgttctgagttttaaacaaagctagaggagatcatgtttctgagaccgttaaggaagcccacggctttgccggcatggagtgagaagatgggaaccacctgcccagtcgggcttggagggcagcgctggttcatttctttgacatcagtggccttagccccgaataatcctttttagaaaatcaaagaagcactcaggctaaatatgcaggatttttgaagtgtccaacagattttatttgagaccataaaaggggtttgtgaactgtctgggacagtcatggaccaagtctgagcccacctggcctgcagatggcttcctgctgagcacctcggtggtcccagccactcctggaaggattggttctagcacagagaacagagcccacccaagggactgtgaggacctggcttggggtggcagggcctgaccccaaggatacatacaatctggaacatttatttgttcaacagccactctcccagaaccacactggggccatgcgatctacagacccttatgtgtgctgtgtgtgcagaggggactcacggtaaacagttcagccagtgtttgtgaatctgcagtgcgatgcaggaagacctgcctgatctgcggtggactggccaggaccagcctaggaaagccatttgggctgatctgtctgaaagagctgaattaaaagtgagagttttaataacagaaatgaagaaggaaaaaaatggccagcagcataggagtgctccccagtgttgctggggagtttcgctgctgctcagcccctgttcagggtcttctggaagctcccagcagcctcctgagacagacaggttggagcaccacagctgcctgcggctggcacacagagtcgtaatttttcttggttttaaaaaccaatccagatcttggaattatccaccgttgtggtaaacttaaaattgtccaaagacaccggatgactctccttcaaatggtgtccctggcccatctctaggagagaactaaactttttttaaaaaaactcacatatcctgtggtttttcaattctcaaaaaaagcttttgtctctcctgtctgttctctccaaaagtagtcttcgttgtgggtttttttttttttttttttttttagagataaggtcaccgggcacagtggctcacgcctataatcccaggactttgggaggccaaggcagacagatcacaaggccaagagatcgagaccatcttggccaacatggtgaaactccatctctactaaaaatacaaaaaattagctgggcgcggtggtgcgcgcctgtagtcccagctactctggaggctgaggcaggagaatcgcttgaacccgggaggcagagcttgcagtgagtgagccaagatcgcaccgctgcactccagcccggcgacagagcaagactctgtctcaaaaaaaaaaaaagagatagggtctcaccctcttgcccagagtggagtacagtggtgtgatcatggctcactgcagccttaaactcctgggctcaagggctcctcctgcctcagctgcctgagtagtcaggactacaggtatgagctaccatgcccagctaaatttaatttaatttatttatttatgtaggtaggtgagtatagacaggatctcactttgttagccaggttggctcaaattcctgacttcaagtgatcctgccgccttggcctcccaaagtgctaggattacaggagtgaggcactgcatctagcccaaaaatagtcttttcttacattttcccctctaatgtcttacctgccataccactgtctgctgtccagctgaactataccaggagccatatgtgttgttttaaattttctagtagctgcatgttaaaaagtcaaaagaacctgatggaagtaattttaataatgtagttaacccagtgtatgtaacatgtcaattcagcatagcaagcaatgtaaaaaagcattcaggagatatttatattctttttttttttttcctagacagtctcgctgtgtctccaggctggagtgcagtggtgcaatctcagctcactgcaacttccgcctcccagattcgagcgattctcctgccttggtcccccgagtagctgggattacaggcgcacgccaccacgcctggctaatttttgtattttttagtagagacggggtttctccatattggccaggctggtctcgaactcctgacctcgtgaaccacccgcctcggcctcccaaagtgctgggattacagatgtgagccaccgtgcctggcctatattcttcttttattctgagcctttgacacatcagtaggttatttcacacagcacatctccattaggactagccacgtttcaagcatctgatggccacatgtggcccatgtttggcaatcatgggtctagatagcttatcaggacaggagttacatttgccctatcagcttgcaaaacatgctgcaaaacagcttgcaaaacagctggggactggagatattggattataccatcttggtgttgcgccagtcaggagtaattgttgtaagttaggctttgacaaggaccttgtaatgatgctcacatagaagataatttataaatacctataacataacctgagaatggcgattaagtaacctggtcttaactccagggcccaccacagcaactttgagcttagatgccacttaaccttttgtaacttgtaacttcattggtggtgggggtacaggcaggtcagcttgttcacatgggctgcaaacatggctttaccccaccgtctcccgtggccttctcaacacactttagaatctgcaggagacctgcagccccccaccagacccccagaatcacactatgctggttggcctgggcatgcccctccccccaagcatttccgctgcacatcccagctcaagaaccaccctctgggtgccaaggtctcctccaggagcacaggttctcacctggggctgatctgccccctggggacatttggaaatgcctggagacatcctggattgtcccagcgtggtggggggctggggagcccctgctagctgtagagatccagtgacagtttgcatgagaggtttctccattgcataccagctgactctgaggagcagcttgacgcggtaggggccctagtgagaaaccttgccttcctggaccatttgggccacaagtcagcataagtgacttctcctaacatcagtaccctctgcaagggagaggctaaacaagaagacccccggggagcccctgctagcttgggaagtgtgtgattctctccactccctccccatagaatcaactgtaaaagctttagccatttctttgggacgactttggatcagcatataaagatactgggtgttctgtgcacactctgcactctgggaagttaatgagcagtttttatctggcatggcacaggctgttcttaatttttacaagcttaagctcagcaatttcaagttcattctaaacattgaaagagtccatttgctcttacgagataatagtctccataaaacctaacatctacatacagtaggtatttctgaaccacactcaaccaaaataaatgtgtaaaaatgttacgaaacatttattgaattagacaatgaccaaaaatttcttcagtgcaaagcacactcagatttggtttttatttccatttcctgttttcttttacttaaaagtctatagaattaacataaaggttgagttctcagtgaaagaaaccaggctgggcatggtggctcatgcctgtaattccagcaatttgagaggctgaagcatgcgcatcagttgagctcatgagttcaagaccagcctggaccgcatggcaaaaccccatctctacaaaaaatacagaaattagccaggcatggttgcacgcgtgtagtcctagctactcaggaggctgaggtggaagggtggtttgagcccgagaggtggaggttgcagtgagccaagatcactccactgcactccagcttagacgatagagacagaccttctctcaaaaagaaaaaagcgagacacaaaagatctataagtgattgattcggtttacatggcgtctcagaaaaggccagtctgtagagatagaaggagaagcggttgcgtcggtgtggaaaggaaaatttcaggtgggcatgaggaatctttcaggggtggcagaaacgttctaaaccagattctggtgatggttgcgcgctgggttttttttactagaaatcactgaagtgtatccctaaaaacaggtagattttatgatatgtaaattataccttaatacagctgttggggaaaaaagaagacttggtactgcccatccccacccccaagggctcccagtttattaagaaaactaaggaaaacataagacagatgaatgggggatgaagccgcaaagggtccccgctgctgcccccttggacatcgtaatagtgaactgtgttctggccttgggtgaggatcaaggaagctgggcccagatctttttccttggttttcaaagccttccaggtaaatatgggacctgccagggtctttcagcactggaaatagccgacatgcccctcagtggcctccaggggaagccccccaggagctttgaggagctgctttctcctccgctgctttgaggagcttatagccccttcaagctcttcccaaacctcacaggcctttctgcgtccctgacagaggtctcaagaggagcctttgacaaacagcagtgagagctgattgctgcccagtgtcatcaagatgccgccattgattctagctttggaatctgtggccaaataggtgactcaatctgaaatttatttggagaaggcagacaaacattcagaggaagcagcagaagttccattagagcaaacctccgcagggagtgagagcaggggccatgctgcagaggaggccggggcagcgtgggtcacccaggcggaggcggtgccgccccctcacatggaccaggggtctgggggcagctctgctcctcaccaaggcccaagacccgtgctgtcataacagtcctccttcagagacacccctcaatcagatctaggaattgaaagtcagattggtttcacaagagaatattgtggagttttttaaagtcttgaggcggggcgccgtggctcatgcctgtaatcccagcactttgagaggccaaagtgggtggatcacttgaggtcaggagttcgagaccagcctggccaacatggtgaacccccatctactacaaatacaaaaattagccaggcatggtggcatgagcccataatcccagctacttgggaggctgaggcagaattgcttgaaccctggaggcagaggttacagtgagtcgagaccacaccattgtactccagcctgggtgacagagtgagactccatctcaaaaaaaaataaagtcttgagaatgttcacttcctgacggctttgcacatggcccataacaagctgtcctgaccttctcagtgtgtgacccaggacaccgtggaatctgggaaagccatgatttccacagtatactcctagaaattttaatctcagagaatgatgatagatgtttctggaaaatgagttgtgtttgagaactggattaaacaaaattacagaggcttctttgtggcacttaataatttcccaaaccactaaagagggaagccccagcgctatgagcatacctggcaacagaccacttcctagagaaatgcctccagtgagccagggctacattttgggaagtgactgtatcctacagagtagaaaaatagtcccagcacagggtctcatgcctgtaatcccagcactttgggaggccaaggtgggcagattgcttgagcctaggagttcaagaccagccagggcaacatggcaaaaccctgtcactacagaaaatacccaaaaaaaaaaagccaggcatggtggtgcatgtctgtgtcccagctactccagaggctgaggcgggaggatcgcttgagtctgggaggaggaggttgcagtaagctatgattgtgcccctgcactccagcctgggcaacatagtgagaccctgtctcaaagaaaaaaagagtagaaaaaaaaaaaaaaaaatatatatatatatatattcatattccaacccccgagagataatcagttaatgtttgacatattacatgtagtcttcctctgcaacatttgtgaaaagaaacagtgctttaaagaatttaagagccttttttgggctaaaactatatcatgaacatcttctcatgtccttatgtatgtctctttttttttttttttgagacagtttcgctctgttgcccaggctggagtgcagtggcgcgatctcagctcactgcaacctccgcctcccatgttcaagtgattgtcctgcctcagcctcccgagtagctgggattacaggtgcgtgccaccacggccagctaatttttgtatttttagtagagacggggtttcatcatattggtcaggcttgtctcaaattcctaacctcaggtgatccacccaccttggcctcccaaagtgctgggattacaggcatgagccaccacccccagccatgtatgtcttttaaagcgttatttttagtggtgtcacaataatccgtccatggttgagccgtcattacatagtcatcccccttggacatgggtttgcaatgaaatattgaaataccgctgggttgagcacatttgtgaatacagcttatggggcttatgattaattcatttctaaggatgagtttctagaaggagccaaatgaggtcaaaggctgtggactttttcaggtattgatccaacatcactgtgctgctctccagaagggtggtgccctctgtgtacatctgttctttctcaccttgcgtctcccctgggtcactgccagcctcacagcgatagggctctgcttcaattgggtctttgctctgctcacagccatgctgtatccatcagggttctccagagaaacaaccaatttgtgtgtgtgtgtgtgtgtgtgtgtgtgtgtgtgtgtaatctgaagtgtgtagggcaggccagctggtgtgtgtgtgcatgtgtgtaatctgaagtgtgtagggcaggccagccgggggtgtgtgtgtgtgtgtgtgtatatgtatgtgtgtgtgtcacatctgaagtgtgtagtgcaggccggcgttctggaaactcgggcagaagttaatgctgcatgcttgatgtaggatttcatcatcacgaaacctgttttttgctctttgggctctcacctgatgggatgaggcccacctgctttctcaaggataattgcctttgtttggagtccatggactataagtgacatctacaaaaggccttcacagcaatgcataggttgtgtgtgatgaaatcactggccgccgtggcctggccaggttgacatgtgaaactgatcatgagtcatcctgctatgactttaattgcctggagaattccttcccagcaaaagccgcacgctgcttctcccagaggggtggggtgcattttattgggcacttttgcctttgaaaacgtaatctccctagataagtattaccactgaaccacctgctgagcagcgtgctagcatttcttgactccagatgggtttcacacacgtctgtcccctacctggctcctgtggctgggtgctagatgggaccatgggacccaagtccaccctctggccccttctccctgtaggattcctaagcttgagccagactggtcgttctgccaggttggttgcccaccctcctacccctgcagcggccccatcccacgtggttaagtgggtggccacacccactgcctttcctttctcacttccagctctgttcttcattccagcagaaggtccagcctcacacagtgacccagtgggcttgaacagtgaggttccagtcccgtccctttagcctcatccctcatgggggaagatacctgatgccggggctggggtgtaggaggtggttgaaacagcctgatctacacccctgcctggtgggttagggctccgatgccacaccaggcctggcatctagacagagagttccacagagtcccctctgcctgctatgtgccaggcactgtactagcaccacacctgccctcaggaaactcacagcatgaaggagagagagacaccaaaaattgcttgatactgtgacccatgctggccaggcacggtggcttacacctgtaatcccagcactttgggaggccaagcgggagagtttcttgaggccaggagttcgagaccagcctaggcagcatagtgagactctgtctctacaaaaaaagaaaatttaaaaaaaaaaaaaaaaaaacaggcatggtggcatgtgcctgtggtcccagctactcagaaggctgagttgggaggatcgcttgagcccaggaatttaaggctgcagtgagctgtgatcgtgccactgcattccagcctgggtgacagagacctcgtctcaaaaaaaaaaaattatatatatatacacacacacacacacatacatacacacacacatatacatatacatacatacatatatatatagtgatccatgcaaaatctgcagcaggggtaggcagacaggaggaagtgggttgcagggtcaaggcaagcctcagagaaaaaaacctgagactgagtggccctgacaggcagttggtgggacagggaagggggtggtacagacggagggaacccccatgcaaaggtataaaagaggaccccccaatatgctaacatgtattccactgttgctgaagactaacactcaaggcactggttaccagggaatgagaacttgtgttgagtttgagattttacttacctggcaagttggccttccagtttcacggagctggtctaagatatgagacttcagggtcagagacaaagaaaaatccgttattcacagcaatagcagtagccagagtattagcatttgggtcatttcccaggtcccagtgcccatagctgtgatgtagtcagggccccatggcatccgcacacatcaagggctgcattgcaggagaggaaccctaagcttaggaaccaaatcttctacagtgggcacaaagcacatttgccctgtgctctggagggagatgctatctccatcatccaaggctgtttcctgtgcatgttcttggaaagatagttgggaaaaaaggcaggcagagcctctgctggaaagacacagggaaaggagagagaagaattgttacccggcaaagatcagactgcctcctccaccaagtctctggtctagattctgtgagtccagaaacctccatctcagtctaggagggacagctaggaggaaataaggacgtcagtttgcaaccagacaagtttagaggcctgtggaattcccaggccaagggaagagttgttacggagactctatggccaagagggacagatcacactagacatcaagctcaatggatgccaccaagggcagccacctgctgtatcttgtacacgtttcatccatccagcttttagcctctcaatccttctcttcctaatagggtaggtataagattcccattgctgctgtaacaaattaccacccacttagtggtttaaagtaacacggaagtattccattacagttctggaggtcagaagtccaagctgggtctgcatggtttcattccttctagaggctgtgagagagtccatgcccctgtctgttccagcttctagaagctgctactcatcttggtggccttgcatcccctctgacctgtttctgtcctcacatcttctgactctgattctcctatttatatgaccctcttataaggacccttgtatattgggcccacctggataatccaagatactctcccctctcaagggccttgtcttaaccgtatctgcagttaggttgccatgtaaggtcacatagtcacaggtcctggggattaggacgttgacatctttgggagccatttcccttctaccacattattctgacctctgtagatactgtggcccatgtcatcaaacccccatgacagtcacagccctgcctatttctttccatccagacaggtggtgcctgtgggtacatctcagcgtagggtgcagacagagttgtctgttggaaggaaaaccacatcgaatcgggaagggagggtcctggctagagtaaggacagtgggcaggaggccggggtcctgtcctgccacaacactgaccacctagaacctcaactttcttctttaaaaataaaaagagagtaactacacttgccatactgaccccccaggttgtatggaagctcagtggagaaaatggccggggtgcgtgtctgaaccgcgctgcatttggacggacactttgtgtgtcacatgttagtagctgcagtgtgtcctccacccgactgagagtctgtgtatcaagataggggtaaatcctttctgaccacttgcagacagaagtcacgcctcgtggtccaaagccaccaagtcattacttttcaaagcttttccagtagagacacatgactccttccttaaaacaacttacagtgaaaatatgtggatggttgaaaaagtaatgtttccagtctgctgaaagttctgtgggttttttttttttttttgcagggcaattatctgtataaaatactttttttcttttaagtagaatcctattgctaatgaaaccatattttgaacatgaaaattgttacaaagaagaaaaaatgtcattatccagaaaagctgcaatagctcatgcatttgatggtctaaatagaacatttttcttctcagggggatgaaagcggtcccctcctattagcctatgaaattattttagaattgggttttaatccctggaacgagaaagggggatggaaccctaacataggttccatgcatgggaagtcaaacctgaaatttagagacaggaaatatagcacgcctagtcactaatccaaaaggaatgtgaaaaaagagttgttttaatgttggaaaaaggcagcatgaaaggtaaggcttccttcctgccgtttcctctggtgcccttttctttcccccgatcacatttgctagatgtccatttctgtaagttttccctctagaacaaacctatcatttttcaccacgggatatttacagcttcaatcagtgccaaattcaattggcttctgatctcatcgctggaagttatagatgcagatattatttgcactgcggttaattatggagcaatcaaaccttggcttttccactgtaatttcctctgccagctaatttaattaatcacccccagctcagctcttccagctgcgaccagcagggtcattaattaggcatgtggtgggagctcacccaccaggtcctgctacggggccgctgcccatttgatctctcagggagggagagcttttcctaagcatcgatcccctccagaaaggaagatggttcccaaaaggcctatcaggggcaaacagctcacctgcagtggtgattggtttacaaaattcacctagttaaagaaaagagggccaggtgcaacggctcacgcctgtaatcccaacactttgggaggccaagacgggtggatcacctgaggccaggagtttgagaccagcctggccaacatggcgaaaccctgtctctactaaaaatacaaaaattagcctggcgcggtggcaggcacctatgatcccagctacttgggaggctgaggcaggagaattgcttgaaacctggaggtggaggttgcagtgagccgagattgcacccattgcactccagcctggaggacaagagcaaaactccatcagccgggcacaatggctcacgcctgtaatcccagcactctgggaggccgaggtggccggatcacctgaggtcaggaattcaagaccagcctgaccaacatggagaaaccctgtctctactaaaaatacaaaattaggcaggcgtggtggtgcacgcctgtaatcccagctacttaggaggctgaggcaggagaatcacttgaacctgggaggcataggttgcagtgagccgagatcacgccattgcactccagcctaggcaacgagcgaaattccatctcaaaaaaaaagaaaaagaaaagaggcctcgccttccatttagactggctcatgaacttgccaaagaaagggctgttgtcagtcgccgaggcttcggtctcaggtttttcaggtcagtgtgtgcctaataatgcagatgtcatgtgatgagctcggtttgttgcaaggaagcgtcgtcctcctcacgggctctttacgttgacattgtggctttggaggctgatattttctctaaaggaaagattaaaggattgttttcattttattataaggaagagacatttttggtataagcccatcaaagttggtgcctaaatgctgcaactgattcttctattattttgaagagcctgtttattttccagcagttaccagcttaactaagacattgtcactggaattccgtataaatgtgtgcatgctcacacccatgcctacattagaaagagaagtaccccaaatttgggaggctttcttatgatcattcttaaatagtttattgtcttataataatgtgggcttttttgttttacttaatatataggaagatttttttttaataccttaaaaatactgcacattaagtctgtttttttacagaaggataaatggatgaacaggtgttttaggagccacaataaaccatcgcagagcaaggagtgcctcttctgagatcccattcgatgctctgccctcaattaaatgaatccgagataaatgggcatgtgcgtgtgtatgcacacacacgtgcacacatacacacacaggcacacatatgcacacaccaaggttctagatgagaaggaacagagggatccagctcagtaattaaaggaataataaggactcattgtgtggcaggtggaagaaaaggtgcaggaggaagactcacaaagtctggaggattggcgctctctgttcagccgggcaggaaggcaggaagcacccctgtcataaaacccctacagcctgtaaacaccaaagttccctcctgtcttggagtggggctgggaggccccggtggggaacagctgtaatgatggttcgctttagttgtgccttcctgaagggcgggggggggtctctgcggccaccttaaacttaaacaagtgtattcagtcttgacggccagccccgtgacctgccagcatattaacatttaaatgcacagtacattcattcatttcatgctgtaaggatcattctggaacgaatgataagtagtggtttttccctgacattcgtactctacttttggaagtgtgggagattgttgagcatttttaaatagccataatgcaaggggcttctgtgtatttctagttcttaaagaaaatgcaggatgcaaacaaaaaattaattttcagacattttctttcaggaaaacctctgtttggatataaatcattgaaaccttgaaacaaatctgtcattctattcacaactcaaatatcaattttaagaatttttgccgggcacggtagctcatgcctgtaatcccaggactttgggaggctgaagcaggcagatcatttgaggtcaggagttcaaaaccagcctggccaacatggtgaaaccacgtctctgctaataatacaaaaaattagccaggcatggtggtgggcgcctgtagtcccagctattcgggaggctgaggtgggagaatcacttgaacccgggaggcagaggttgcgttgagccaagatcatgccattgcactgtaatctgggcaaaagagcgagactccatctcaaaaaaataaaataaaataagattttttaggccgggcacggtggctcacgcctgtaatcccagcactttgggaggccaaggtggatggatcacaagctcaggagttcaagaccagcctggccaacatagtgaaaccctgtctctactaaaaatacacaaaaaattagccgggtgtggtggtgtgcgcctgtaatcccagctactcaggaggctgaggcaggagaatcacgtgaacccgggaggcggaggtcgcagtgagccaagattgtgccactgcactccagcctgggcgacagaacgagactccgtctcaaaaaaaaaaaaaaaaaaaaaaaaatttttatttacccaattctgtgactgcctgaactggccaggacaaatagagaaggggtggtaggggggcagtgttagattctttctggagcactagggtgcaaatcagaagcgtcctttgttgctgcagctctccccagccgcctggaggatctgtttgggaggggagcactctctaaggctagttttgttcttgctcagatgatcaaatctctaatgcatctctagtaccaacctcacttcccagcctgagtttccatttgtccccagtttccccacacaaagagcaacaaacactgttccagctggtaggaccagcccatggatcccagaggcccagcatgctcagggctccttcttttttctcatttctctcctccccatctccagacagcctttaccgttcataaaaagaaatgcaggcctaaagaggactgggggctggaagagggttaggctgagtcccattgcccagggcatgaccagggaccatgtggtggcccccaggggcatcatgtggttttccaggccaaggagctgcctggctccatgggccgcctcaggatgtggcccagccggcttcctttgtgaaggcaagccccacacaaggagcaggactcctggaggggacaatggctgtccatcagtgatagcaaattccagcgtccaggccgtgggttcatctggctgccaggctgggctgatggcagcaacgctgaccacactcgtcatttctctgctgttatcacagcctgggagcgggacaggatctgttccattgactgcatttttaaagctgccctgatcttcctttttgccctaatcttccttttcctactgcccttttcccccctcctcctgcttagagataccagctctgacagtccgaatgtaagaaataattggattctaaattctaattcatctgtaaagtattcggtgattaaattagcctaatagatattatttcttacatgactgcgtaattttatcctgattggatctcagtggtactaacgtgccccccaatttactattgacttgaaattctcagaaggcgagacataactctctgtcttcttcagtctgttttcccaggttaaaagttaaactgatttatgctaaaggaagatcaccttactgctcaagtgtagttgcacagtgtatattgttctttaagaagagcagtacaaggaaaatattattttatgtaattttaaatcctctttttcctctttttctattcagaaactaaaagaaatactgcccatttaaagtctttggacagcaatttgattgcaggtaacatagtttctcttttaaatagctggaagtctcatccaaacaaaactaaccgtcactcagcatagagctgataagtgttgtggatacattccaaaaaattttcaacattcttaggataaaattttagctgggcgtctttagccatttttaatagagccgcttaaattcttggtcaggaatgagatagaaagggaacgaagtcatggaccccagagatacacaggagggcactggccagcacttattcatcggccttatttctttctttctttgcataaatttaatttcttcaagtatgtgcctctcccctcccccacccccctgccctacctccctccctccaaaaatctgcaaataaaattccccgctccctccctggttgagtagctggaagcagctggtgggttttgtgtggctactgaacagtgggggaaaaaagttttggcaaacactcgggaaacccaggacagaggaggtaggtaaactcaggaaactgttttcatgagtaaatgaaggaaacaaaggcctcgcagcaggagcagaagggacacacactccctctgaatagctccctaaaaacagagctgaaaaggaagaaggcccatttgcttctgggaatccaataaattgtttcaggaagtgaaagtctgtccaggctaatggagctgtgattgacaggccttctcattatggagcccatcaggggacagggcattccagtgttatttaggggtcgaggtgggaatgagaggaagccagagcccggggtgggggcgggagcgggggctagctgtgggtgttcattgaaagagtccaggtccccgacagccctgctccaaggacagacaacctcgtcttgcaggatcatttaccttttatattatgacctagccacttctcatggctctaccacaccatcttcccgagagagcctgtgcccgccccacagtcccggctgaaatggcaaatgcggtgtaggactgtggtgcacactgcccatgacgggctacttggacggctcatgcccacctctgactagtttgatgttctgaatcaggccccttggttaagcgtgataacatgatcacctggtgttttaaagcttttctctgtttccatgtggtgccgtgaatagtctcataagccatgtaagtggccttattggttaagtgacaaccggggacatacccattttctttgtccatgaagcaccaaataagaagttggcgtccattaaactagattgattatttaatatcacaaggcttttgaatgggctatggggaggaatagaccagaggtctttgccaggaggagacgttacagcaggtcctctctggttgggacctgcttaaagatgtgtaaagaccttgaacatcagcatctggcacagccaggggagggacagggaggacgagagacctgcttggtatccttggccccggggtccaggttattcagtttgttgatggctatctggcaggactccctcctgagcaagaaagaccctcagtctccacgatggttatttccagaaaagtggggaccttcaccaatgtgcctttcattgtgaaccttacccagctgggctccaggacacctaggcacatccccgtctctgggtccccagccttatcatgtgtctgagtgtcctcagacagtggaatccttccttcaccttactgagagaggccagcgctgttttcattttggaattggcaaaaggcaagttttctcctacaatgctttgaaagggtttaatgcacactgaagaaacagccagatagctccagctctgctggaaagggcaaagacccattaagcatctggagtttgggtcctgggttgtcacactctgtaatgaccatcttggagggtaagacacttggcagtgggcatgtgaattggctggcatttccagagtcatccttactgttgggctattgggtgatagctagtgggtgatagctattacatgaagaagatgcctctgtgaacttaaatgttggttcagtgactcacaggctccaggcagattcatagatgctttcatgtttactgatgcattttgtattcttaagcttcaggaagtagtgttaattatttatctgggtttaactacactttaatttttgtaaactaagtccagagcggtctacatagtaaaaccatagattctcttttgtttgatttctgtgaattgcagcagtttatgccacaattgtagccctgtccccattgtcacgaatctatgtatccttctgcttctattcactgtgttccagaacctatcacggtgcactgcaatacctcattcctcacgagtgctcagttggtatttcttgaaagaatagttgcttaacagggcattcgatcatgatggtgatcgtcataaagacacacggggctgaaatcaaattcaaagaactcacttctaccaaaagagaaagaactggtttgtataatatgtttcaaagtacagaaggtagaaggtacatcaccaccgtccatcacgtgaaggagtagaaaaagtgggatgccacagttgcggcagagaatatccaaaaggaaagggtccaagtcagaccgctcacgtgggtggcagcgtccaagtccagtttgtacatttctgcatggatgaggtcttttcaaagcacatacagttgtgtgatttttatttccccaagaaaaaataaaaagttaaagtcagtctagtcaattgctttaacacaaagagcaaactgacacacagtttccctgggcattgctacatattccttgctcttccgtaaaggacacatgtgtctctgtgcctctcagtctcccagttgcaaagatgccatcccaggtcaagctgaggtccttgcaaatgaactgcatgctggagataaagcgcctactaggctgccgggtactggcagaagagagtgagcgtagcaactgggaggtggcctgatggcctgcgcctgttgccgttgatgagacccaaagtctggaacgaatctggttccatatagagttcatgctcaccccgaagtccttctttggcactggagaacaaagaagagtttgcacagaagaaaagggaggttgtttaaccagaaaggccctctgcaaatttctgattcctgtacagtcagcattaatatgctgcttttcagacatccaaatgggggattgaactgtgagagtgcaggcaataaagagtgcatttgtggaatgataacctgactggcatccctgcctcttgaatggctgacgaggtctaattggcatgtaacgccctataaatttattagcatgcctcatttctcattggtggactttctactgttaaccaccaagaaatgaccaattttcaggagttagtcactcaagtcgtacttataactaggttggaaaaaaaaaaactcacactgctcctattataaatcaaccttatgcctgtacagcagctccctggctgcaaatgaatccatcggatacagaagttttgaggtgagtggagttgcagggaggagcacgtgtttaccaggaaacccactgctctcctcaccttgccctgcgcgcctgagcccttcacagagaccggccgtgtcctcacccctctgtcaccattgtgggctccagctgcacaggctggggatgggctgggtagaaatggcagttttgtggtcgttcgcacccaggactttgatgttcctactgatatattcaaccctcaggcgtaccatgcaaagaggacatagccaccctcttatttcaagagcatgatagaaatattcagaagcagacataattatttcaattacttctctctggtttttgagacgcacactcaagagtcacaaattagaaaataatattcacatgtttcttctaattggtaacagattagaggcattttatctttttaaataatttccaaatgtgccccaaagagactgtgaagggagggaacagaggcatggaaaagcaaacgggctttgccaagcgagtgagaggcgggggtcggagggaggccttcctcctgcagcgtgtttccagttgttcggatttttgtgttattttcatcacttttggatattgaaagctagcagggagggggtcttcctggttatacggcccagcttgcaaacataatccttccttgtttttcttttgttggtggtggttgtgtttgttttgttttttgttttgttttgtttttttgagacagagtttggttcttgttgcccagcctggagtgcagtggcacgatcttggctcactgcaacccccgcctcccaggttcaagcgattctcatgcctcagcctcctgagtagctgggattacaggcatgcgccaccatacccggctaattttgcatttttagtagggatgaggtttcaccatgttggccaggctggtgtcgacctcctgacctcaggtgatctgcccacctcggcctcccgaagtgctgggttgacaggcgtgtgccaccgcaccggccgtaatcgttcctggtaagcacatttctgaacacatcaatccgctgcctgcatgccctgtccttggccacgtgttttctacacacgtgcatgcgtgtttgcatatctgcacgcatttttatgtccagtgtacttccaaaaacagatttgagtcatctatgcctgtctctctgtgcagcaactttggaggggtgaagacggaggtcgctgctagtccaggtcgcctggggccctgccctctgacacagggtatttcaagttcctctaaatcctgagggtctcaactgttcctttttcataatggaatttggttttatcaaatactgtttttaacatttagttgcctctgctctggaaaacagttttacagtttcttataaaactaaacgtgcaccttccttatgacccagcaggtgcactattaggcacttatcctagagaaagaaaaacctaggccgggcgcggtggctcactcctgtaatcccagcactttgggaggctgaggcaggcagatagcttgagccacgagagttcaagacctgcctgggcaacatagcaagattccgtctctacaaaaaaatacaaaaattagccgagtgtggtggcgtgcaccttagtcccagctactcaggagactgaggcaggaggatggcttgagcctgggaggcagaggttacagtaagctgggatcatgccactgaactccagcctgggcaacagagcaaggctctgcataaataagtaaataataaaacttaggtttacacaaaaacctgtatgtgaatgttcttagtggcgttgttcgtaagagcccaaaaccagaaacaacccagatgcccttcagtgggtgaaaaagtaaacaagctgtagaccatccacactgtggaaaactacttggcagtgaaaaggaatgaattcttaatacacaacaacaacttaggcgaatctacagggaattacattgagtgaaaaaaagcctgtcccaaaagattacgtgctgtaggattccatttatgtatcactgttgatattacagaattacggagctagagaacaggttagtggttgtccagggttagggatggagagggtgggtgaggttttagaaaggcaacaagagagacccttgactggtgctagatacaggaacgtacatgtgaccaaattgcattgaaccaattccatggacacataaatacaaatgaccacaaggaaaatcggaaatgtggacaagccaggtgggttgtatccatatcctatggtgataacatactacagtttttcaagatactgcctttgaggggaaaccaggtaaggggtacatgagatctctctgtattatttctttttcttttttgtttgttttgttttgtttgtgacagagtctcgctctgtcacccaggctggagtgtagtggtgcagtctcgtctcactgcaacctccgcctcccgggttcaagcaattctcctgcctcagcctcccgagtaagctgggattacaggtgtccgccaccgtgcccagctaatttttgtatttttattagagacggggtttcaccgtgttagccaggatggtctcgatctcctgacctcatgatccacccgccttggcctcccaaagtgctgggattacaggcgtgagccaccgcgcccggccgtattatttctttaaactccatgtgaatacacaattatttcaaaaaagcttactaaaaagtttaaaacaatcaagcaaaataaaaggtggcttcccttaaaagaatcagggctccttggagaaatggctcattccagatctggttgagaagtagggaatggccctggagcatcctgctgtgccagaaagaaagcacagagctaccagggaccagggcagatgccgcagacagaaacaggagcggctccaggcctcccactggccaaatctggaacaattgaagcatctaaaagaatagtgttggtggcagtttatgtgacacatttaatttttaaacatgggtccacgacgatactccagaaaggcagtgggggagaagctcttctttataaaaaatgccaaccagtaaacagagaggatgagggaactggaaaatctctatcccgcaaccaaaaacgtgatattttaattggttcagtcaaggatcatcaactgaagctgcacccctgggggagaggaacaaaatattccgcctcaaggtgtcagcccagggaaactgaagctgcacccctgggaggggaggaacaagatattccacctcaaggtgtcagcccagggatcacttggtcattgtaaagggggaagggacctggacagagacctggtggctcctgctttagccacagactcagacagactcggtagtggaacaactcacagtctgtgcctcctgctggtgatgcaagggagacgtggcacctctgtagtaatattttgacccaaatggaatcggacaaacacaattgggggcattttccaatagaaatagcttgaaatcctcaaaataccaatgtaaagaaagaccaaaaagaagagtagggtttggaagggactctcacatgggaggaggtataagaggatgaccaaaggcaacatatatcctggattgggagagaaattcagccctagaacgtatttttggataatttggtgaaaactgaatatggaccacatatcagtggctgcctgccagtcataatcatgaaaaacacaatcccaaacaccataatcccaagtattgaaatctctcaagtctgaaatccccaaaatcacaatcccaaaaaatcaaaatcccaaaaatataatcctggaaaagatcatttgaaaaattacttaaaaggtattttttgacatttttaaagggggtttctctgagaaacatataaaaacacaacagaacactttttagagcacttttcacaaataggcaatgataacctatatttttgcaagcataaaccccaggtgtactaacaacagtcatatggctgtaacaggtacaagcagactgtattcataggtcagaaatatataaatgcatgtcactgtggttgctaattatgggcactcagctgtataacacctgaaatacagtgacgaacaacttcagtcttttgacaagactgatcaaaagctgtgatggagccagtgtgtggcacacaaccatagtcccagctactcagaaggccacgtcaggaggattgctcgagcccaggatttccaggtcagcctgggcaacataatgagactctatatctttaaaaaaaaaaaaaaattgcaaatacgatgggtcaccatggcctatgaagttgccaaaagagctgagaattttttttttttttttagacagggtctctgtggctcaggctggagtgcatggctcaatcacggcccactgcaacctccacctcccgggatcaagcgatcctcccacttcagcctcctgagtagctgcaaatacaggcacagactaccacgaccatctagtttttgtattttttgtagagaccaggcttcaccgtgttgttcaggctggtcttgatctcctggattcaagcgatcctcccatcttgacctcccaaagcgctggaattacaggcatgagcactgcgcccagtgagagctggagaaattttatctttcacaaacgcagatgttcatttattgaagaaatttcatgaaatttgtggactgtatgtaagtgcatacagaatgaatttccacatacccaaaacaatgaaaaagcctggcacagaagatgggaaaattgatctgggcaacagtggctcatgcctgtaatcctaaaactttcagaggccaaggcaggtggatcacttgagtccaggagttcgagaccagcctaggcatcacagcaagagaccccatctctacaaaaaaaaaaaaaaaaaaaaaaaaaattagcctggtgcagcggcgcatgcctgtggtcccagctactcttgaggatgagatgggaggatcacttgagcccgggaggtccaggctgcagtgagccctgatcaagccattgtactttagccttggtgagagtgagacactgtctcaaaaaagttgtgggggcagggcaggcgtggtggttgacgcctgtaattccaacacttcgggaggccaaggcgggtggattgcttgagctcaggagttcgagaccagcctgggaactgtggtgaaaccccgtctctacaaaaaagttaaaaattagccaggcgtggttgcatgcacctgtggtcccagctactcgggaggctgaggtgggaggatcactggagcccaggaagtcaaggctgcagtgagccatgatcatgccactgcattccagcctggttgacagagttagaccttgtcttggctgggcacagtggctcacgtgtgtaatcccagcacttttggaggctgaggctggaggatcacttgagcacaggagtttgagaccagcgtgggcaacatagtgagatgccatctctataaaataaaaaaagattaaaaaataggaaaaaaagactctctaaaaaaatacaagaaaaagggaaaatctaacaggaaattctcatgttggtagatattgacataggcagtgcttacagtgttgtggtaatgtactttgatggagtcaagtttgcaaaaaatgcataaaactaattagaataatgctgacaatgtaaaattgtgggaaaaaacttttaaaaattttgacatatgaagaagtatattagttcagggctagattatggatagttgcacagagatagtccctaagagctggccaacttccacgatcattatatttttgagttttgcatcatggcgcatagctgcttttttccttttaggatgtgcctctccatagagaagaagttcacattccttttctgtgtgacgctgctcttttagaaattcttccgtgattcagggttcgccaacatgagttatttcccattaaatttccccagcttctgtgccatgcttctttattgttttgggtacttggaaatccattctgcattcgctcaggtacagacctcagatttggtggaagcaatactgatgatggaaccgcagtactatgtatcttaccctaccatgtgcatagctgtttttcatccagtaggtaacttcactggcttcttcacacaaatgtggctcttctcattaaaagctcctggaatgtcagccaggcacagtggctcacgcctgtaatcccagcacttcgggaggccaaggcgggggaatccctgaggttagaagttcgagaccagcctggccaacatagtgaaacacccatctctactaaaaatacaaaaattagctgggcatggtggtgtgcacccataatcccaactacttgggaagctgaggcaagagaatcccttgaacctgagaggcagaggttgcagtgagccaagatcgcaccactgcactccagccttggggacagagtgagcctccatctcaaaaaaaaaaaagcttctggaatgtcatcagttagatggaatgccagtgcagacaaatgatgcagttttattttttatttattttttatttttttgggacagagtctcgctcttgtcacccaggctggagtgcagtggcatgatctcatctcactgcaacctctgcctccccggttcaagtgattcttctgcctcggcctcctgagtagctgggattacaggtgcccaccaccacacccagctaattttttgtattttattttagtagaaatggagtttcaccgtgttggccaggctggtctcgagctcccaacctcaagtgattcaccccggcctcccaaagtgctgggattacaggcgtgagccaccctgccgggccaaatgatgcacttttaaactgaagtttcatccttgccgtatcacgtggccaatccattcatctgacttttttaccaaatgcattgagctgaatggaaaaaacaaactttattggtaatatcctgaaattcactttcagaagccttgatggcaccaattccaaatctgtccttatggtttgggattcaagtgaaacctatttcctcctgcaaagtccatcaaatcttaaataagtttttatagtaaagtgctttacttttttcagcatttgggattatggtgtttggaattgtgtctttcaggattatgatccaaacccatgataggtaaaaatgtattaattttaagttctttggctataataatgtgggtcttcaaaatgtgggcttgcaacttgagagactcacacagtggcgtctgtctgagggagcaaaggagcaccagattctggattttttaactgtcatgaaatatacataatataaaatttgtcatcctaatctttttttttttttttttttttttttttttttgagatggagtcttgctctgtcgccaggctggagtgcagtggcgcgaccttggctcactgcaacctttgcctcctgggttcaagtgattcccctacctcagcctactgagtagctggaactacaggcatgtgccaccacacccagctaagtttttgtattttagtagagatggggtttcaccatgttggccaggctggtctcagccaggcgcagtgtctcacgcctgtaatgctggcactttgggaggccaaggtgggtggatcacgtggtcaggacatcttagccaattttaagtgggctgttcagtggtgctcagtacattgacattgctgcgcaaccatcacgaccatccatctccagaacttttccattaccccaaactgaaactttttacctattaaatacaaactcccacttcccctggcccccaccattctactctccttctctatgaaatgacgactcccgactcccggcacctcatgtgagtggaatcttatagtatgtgtcttttgtgcctgacttacttcactagcagagtgtcctcaaggctcatcatgtcgtagcagatattagaatttctgtccctgaatattagaatatgcagcctttaagaaggctgagtactattccatcgtgtggatagagcacattttgcttatctaaacttttgtcaatgaacacttctgtttcttccacattttagctattgtgaataatgctgctgtgaacgtggacatacaaatgtctatttcagtccctgctttcgattcttttgggtatatacctagaagtgggattgctggactatacactaattccacgctgaaccgtcataccggtttttcagattctgaacgttttattcatttaaaatattgttgggccaggtgcaggggctcacacctgtaatcccagcactttgggaggctgacagggaacacatgaggtcagttcaagaccagcctgagcaacatgatgaaacttcatctttgctaaaaataaaaaatcagccgggcatggtggtgcacgcctgtaatcccagctaccagggaggcagagacacgagaatcacttcaacccaggaggcagaggtcccagtgagccaagattgcaccactgcaatccagcctgggtgacacagcaacactctatagcaaaaataaattaaattaaaatgttggctgacttgatgaaatctttttttcctttttttttttttttttttagagaaacagggtcttgctctgttgcccaggctggagtgcagtgccacaaacataggtcactgccgcttcccgctgctgggctcaagcgatccccctgcgtcagcctccccagtagctgggactacaggcgtgcaccaccatacccagctaattttttttaatttttatagaaacagggtctcatattgaccaggctgatttcaaactcttggcttcgagtgatcttgccgtcttagcctccccaagtgctgggatgacaggtgtgagcccacctggccctaaaagccctttctaaaggcctccaaacatcctagtgcgtaaggactagatccttacttcctagagatgtaaggactagaggaaggaggctagtcctaggagcagactagccccacctccccagcgggggagccagcaggtaggctgctgggcaaggacttcactgcaaggagggacagggtgggccggggggacttcccagttatgtcaggtttcaaaatatatttggggaataaaaatagggtgcttggggccaggtgcggtggctcacgcctgtaatcccagcactttgggaggccgagggaggcggatcatgaggtcaggagattgagactatcctgactaacagggtgaaaccccatctctactaaaaaaatacaaaaaaattagctgggcgtggtggcgagcgcctgtagtcccagctgctcgggaggctgaggcaggagaatggcatgaacccaggaggaggaggttgcggtgagccgagatcacaccactgcactccagcctgggcgacagagcgagactccgcctcaaaaaaaaaaagaaaagaaatatggtgcttggttcttaattttgcagcattcaggacattaaataagtcatttgctgtcaccatcctttcaaaaaaaggacattttatcatagggaggccgtaacatcagaattgccctacagattcaaaactggctttctgagaacctcactatatggttttttattgtttctcagaggatttggtgatatctttgccaccaagtgacacttgaaagcagctgggctctccaggatcagctagagaatttgaggcccatttcaatttttatcaagaatttgaggctgggcgcagtggctcacacctgtaagcccagcactgtgggaggctgagacaggtggatcacctgaggtcaggagttcgagaccagcttaaccaatatggtgaaaccccgtctctactaaaaatacaaaaattacccaagcatggtggcatgtgcctgtaatcccagctacccaggaggctaagacaggagaattggttgaacccgggaggcagaggttccagtgagccgagatcaggccactgcactccagcctgagcaatagagcaagactccatctcaaaaaacaataaaaaagaatctcaagatggtaagagcagaaccgagcatgggccccttctgagcactgggcctttgcaaccgtagagatccacacccatgcagccagcgttggactaggagacccctgaggccccctccgtgcccctcttctaaggttcctttctcaccaagaagctcagcagagagttttgattttgcattatcaaagtcagtgacattgagcaagttaaactctgtgtcgatggtagaaaataaaacatctgaccagtttctgcctcctgatcccattagtgataggtttggtgattttaatgaaagaatttcacttagcttgttaaataataatgctttccttactctggagaattaatttatgtattcatgatgaatcattctcatcagcttcccagctacacagccaaacttaggggggaaaaacacctagtgggtgtatagatttgactctgatatttttattgtttttcaggttaagattagttgaggccggatgcagtggctcacacctgcaatcccagcactttgggtggccgaggtgggcagatcagttgagatcaggagttcaagatcagcctgcccaacatggtgaaacctcgtctctactaaaaatacaaaaaagattagccagacgtggtgtggtgcacacccattgtcccaactacttgggaggctgaggcaggagaatcgcttaagcccaggaagcggaggctgcagtgagccgagatcgtgtcactgcactccaccctgggcaacacagtaagattccctctcaagaaaaaaaaaaaaaaaaattagttgagaaagaaaacccaactgttgtgcatttgttggattttctctggaaacgccatccagtctgtaataaaatttcagttgtcattaccctggatggaattcatcttggctggagtgagtggcttcatgcagggcaaccccactgcaaagaatgtgagcatcagctaggctgacacaggggtccgcagacccaggcccctcattccatcagtttctttcagcatgtttccatgttttcatattttgaaaaaagtcaaaatccaaattgattttcaatgtgtttccctttggttattccccactcccatgcctgtcctctcttaaaatctctgttgttggtactgtttgtttttggctgttggaactgttgtgatcccccaccacaagcagattaaaaggtataccacattaagaagactccttattgttccaaagcaatggtcctatgtctttaaacaataatattaccacaggccgcagttcttaaagccacttggcagtttttattggaagcctacttggagttctctgcagctttttctgaatgtgtcgccgtgtcatagcctgcgaccttctctttctcaggtttgacagccacttagccagcaaatccctgagaagccaccggcctgaactgggccctctgcagtcactccggcctgtccccgcctcttccgtgtgagaagagccttggctgttcctctccctggtgtttaaagggcgtcggtgcacgtacagcgagggcttacatccactttacgggatccggagcggaggaaaagggccatttctcttcccttatctgtttatgatgcgatatgttccaaagccgatcacatcagccgctgttatggtgaacggaattcactgtgatggcggctgcaccagcagagccgccgtgggcttcatgccacgttacgcggagtctaggacggcctcaccccgctggctcgggctccctctcactgggtacacatttatcgggatttatgctttaaaacagtagttcacattttttctaatggtgaagtacagaaacttccattctgtgtgtgactagcatggcttagctatgtttctgtgcaaacatactcacacacagtttccaaatgaagtcacaaacttcccttataaaacttcctttgaggctgggcccggtggctcatgcctataatcccagcaatttgggaggctgaggcaggcagatctcttgaggccaggatttcgtgactagcctggccaacatggtgaaaccccgtctctactaaaaatacaaaaattaggccgggcgcggtggctcacgcctgtaatcccagcactttgggaggccaaggcgggcggatcacaaggtcaggagatcgagaccatcctggctaacacggtgaaaccctgtttctactaaaaatacaaaaaattagccgggcgtggtggcgggtgcctgtggtccgagccactcaggaggcagaggcaaggagaatggcgtgaacccgggaggcagagcttgcattgaggcgagatcatgccactgcactccagcctgggcgacagagcgagactccatctcaaaaaaaaaaaaaaaaaaaagttagctgggtgtggtggctcatgcctgtaatcccagctactcaggagactgaggcaggagaatcacttgaacccgggatgcagaggttgcagtgagctgagatcgcgtcattgcactccagcctgggcgacagagtgagagactgttaaaaaaaaaaaaaaaagaaagaaagaaagaaaacttcctttgagcagaataataaaggtgcctgtgttaaatgccgagtgggtaaaacacgtctgcaagtggagaatggcaggaaggggctcagagacacaatgagactttgtgagttaagggggtgtcactggcgatttttcctgtaaacgtcccgtgttttgttgtgttgttttacaacagattagaaaatggtggggaaatactaaaaataaaaatatgtccggctgcttctggaacattctggatgttttgcctttcgctaatagtgtaacttttttttcaaaagtcattgtcttaaaagacttcaaaattgctttctgttctcccaccgcaagcccccgccccacctcttggctctgcctatcccctcccctccggggtttctgcccaccccccacccccaggcctggcctcctgggtgccacatctccagggcccgacccattaatggcctgcattctgaccgtgactcccagaagactcagccccctgcacagcgcctcctccctgctccagacagcacatgtgtcgtggaggggtctccctcaccaaaaccagcacctctgtcccgttccatcctccggcctcacctccgcccactgcctcccagaaaaaggaaaaatctctacaccgaggtcactggtcagtcaccccgggtgccaagctctgctgtttctaaaggcatggtcccacccattggtcacaagccctgagcacccagtttggggcatgttagcccccaagggggcagctgggctggctggtcctcattttgttcacagcctgtgcagtctgaccctgctgggccactccccgccccccacctcagcacaggctccatctttttctcctgggccccttgtttgtttgtctttcttttttcttttcttttcttttcttttttttctttcttttctctttttcctttctttcctttctttctttcttttcttcttttttttccccctgagacagagtcttgctgtgttgtccagagccggagtgcaatggcgtggtctcggctcacagtaacctccacctcctgggttcaagcagttctcctgcctcagcctcccaagtagctgggattataggcacccaccaccacacctggctaaatttttgtatttagtagagttggggtttcaccatgttggtcaggctggtctcgaactcctgacctcgtggtctgccaacctcggcctcccaaagtgctgagattacaggcgtgagcgacatgcccagcctctcctgggccccttctaggcaccccgccatcctgtctggctcctgtccccaccctgccctgtgcgtttaccaagggctgacccaggcattgagccacatgcacaaccgccttacgtccttactatgtccctgagatgtggagggttttatcccctttttgcgggtagggaaattgaatattcaaacccaggcctgcagcaatgtgaaaccttaggtacttcccacttgcatttaggtggggggccttgggcagtgggtctgccccaggagccccgcaaggcgggaggcctgtgtaaaggcctgcaggaagaggctgagggcccgctccagcagccggggcgctggtagggccaggcctgttggctgctgtgagagatacgccaccaggccaggctgacatgggcagttccagtttcccaaggcagtccagcctccagcactccatcctgttccatccccagtgccctctgactgcacggggctgagaagtcccccagcggtgctcctagacaggtggagacctcaatcctgcagcctcatcaaatgactccccaacaggggtggatcctgcccctcgaccagcacctgtgctgtctgcccctcacaaaatccttgtcccttctcagattccttgggggcacagggctgtgagggtcaggaccaccatcagaatcccttacaaagccacagccctctggcctcttagagaatccaacttgggttacaaagacaagcgtgcacaggccaggcgcggtggctcatgcctgtaatgccagcactttgggaggccaaggtgggtggatcacaagggcaggaggtcaagtctagcctggccaacatggtgaaaccccgtctctaccaaaaatacaaaaattagctgggcatggtgatgcgtgcctgtaatcccagctactcgggaggctgaggcaggcaggagaatcgcttgaaccgggacccgggaggcggaggtagcagtgagcccaagttcatgccactgcactgcagcctgggctacagagcgagactctgtctcaaggaaaaaaaaaaggactagcgtgcacagagccctcgaggtaccagagcagagctgtggatgcccgtctaagcctgtgcccatagctctgactggatttcaccaactccactctggcaggttagcatcaggagagacactgtcctggctgctgggtgggaagataaagctgagttccttctgtctgtctcggtgagagaaggcacggccctcacccagggcagcagagatcagggctgactttccaagccagcaagacatgcattcaggctacctacaaggaaaagcagttagattcgagcaaagtggtgaattggtctgaatggaaaaatccaaaacatcccactttaagaaccctgcatgcacacagtcttgcgtcaacttcagttttaacacgatagccaggtaagggggaaagatgggcggagcgggggaccaaggacagagaggaagacaaaggctctgtgagctgtgcctgctgtaacaaaatacacaacagaaagtattcctcacacttctgaggaatgggaagtccaaggtcaaggtgttggctgattcatttctggtgaggggcctcttcctggcttatagacagatgcctcttgcagtgtcctcatgtggaggagagaggagaggggcatctctcgtgtctttttttttttttttttttttttgagacacagtctcgctctgtcacccaggctgcagtgcagtggcgtgaactcggctcactgcaacctccgcctcccgggttcacaccattctcccgcgttcacgccattctcccgcgttcacgccattctcccacctcagcctcccgagtagctgggactacaggcgcccgccaccatgcccggctgattttgtttttgtatttttagtagagacggggtttcaccatgttagccagggtggtctcgatctcctgacctcatgatccaccctcctcggcctcccaaagtgctgggattacaggcgtgagccatcgtgcccggcccctcttgtgcctcttcttataagagtgagaatcccattcatgggagtctactctcctgacctaatcacctcccagaggtcctgtcaccaaacaccatcacacagggggttagggcttcagcgactgactttccggagcacacacacaccagtgctcctgttgcccctcccagggacaccttgcattgcagcaaatcactgttttctggctgcccttggctggctggctggcagcctttggggccctaggcatcaggatgtctgctctgtttgtttgccaatttcaaagcacataccggaatcagtgtggctggagctggagaggaccttggttttagaactttgattgaagcctaaggaccgttggtccatctgcagagcagcagtgaccaagcctctcttggcctttcctagcatgtcatccaagcctgagtgggaagcggatgtccatatgcagctcaccagagccggcctaaggagggttgatgtgcaggcactgcggcagcgcacagggctcaggacccctgggcgggcacctgtgtgccacccgggctgtcgtgtgcgtgactcggctagcccctgccctctgtgtgatgggcaccacacttcttccagccttgtggcatcccaagtaggcagtgaaaagcttcgagaagggtgggctctgggggccatgctgggattccaggaacccgagaattcacgtaagccaattctttcattctgggctcccatgaatgcatttggagaaggtggctggagtcacgcacagccagctggtgggcagggctctctgcaggccatgggctcattttcccacctgcgtaagtcacggtgctggtggtagcaggatggggtctgcaggtctcgcaggagtaggtcaagaggaccaggcaaggtctggcttcctgatggggacccaggagagagaagccaagaacccctgctgcctccttacccaactgcatatcacagagtgtgctgggccccgtggaggtggctgcagtctacaagggggtggctgccctggcctatggtgcattttacagatgtgtcaacgtgggaagctgggccaaggccatcctgtgcggaggctcaatgagagagcaccctgggtagggtctggacctgctgtgtgggcctcttgctggcaggcagctctctgttcccgaggttgcagcagctgctttctgtcctctctttacccgttcccccccgccccacccccgccagcggattctcctgcggaacctcaaacttcagaggcagcaggccttgaatcattgagcctccagagggaaaactgaagcctgggagagggtggctgcccagggccccacagccaaccatgtccttgcccagagaggcctgggtccctcctcctctgtgctgggtgcttcctgagtgcttggcacatctagacaccaaacagacccttgggtctgagctgactgggttcactagctagcctcacgcatcctccctgccgggctgctgtgggctgctgtcctggtcccacatctcctttttgcgcgctttcatgattcctcagacagtctccataggttgcctcaagactctggaagaatgaggttgcatatgcactgtgacttgtatccaggaatattatcctactcaggctggtcaggtactcaacaggcagggagcgctagtggcagcaaagccacgagtgccccaagtctcaacccgaacctcaggcgaaggtttggggacaagactaagctcagctcccagtaactggccctccccttgcctcaatcccttctggaacaacacaggctgtgccagcctgcacagggcagtgcagaatcaggaaaacctggctggggccagagtacccgggcacatcctcgctctcctgggccgcctggggcctgcacctgccgggggatctgccagcccccatacctgcggccgggcacatttaactgtgacttgcagaagtaataagcctaatatggttgactttatttaattaataatgatcctcttctgttcctctgcgctcataaaacaccctgcaggttggcaaaaacactcataatattgatcagaagtcaggcgggatatttattttgtctttgccccactagcataaatccttgtccactgcctcctcctccccgcatgcgggatttacagtggccagcttcttaaaagcattcagtaattaaggaataaatatccattggcctttgtgggctgtgctccgtccctccgcctgaccccctagcaacgcagctcagggagaaggcatgcatgcaagggggaggcagctgtcagcgcccgctcgcagtgggccggggtcttcccctaccgagaaaggaagcccctctctcttcctcacgtattgttccagccccctcttccatgcctcccctcccagttcctgttttgcttgaggcaggaagcactctggaaattccttgctgctagccctcttttctctccttcctctgcccttcctctcctccttgtcagtttcaacaccaggcgggcgggtcccctccagtgtctgctcctcaccctgagggtgttcctccacgccagcccgctctgctacagaatctccttgaaaatcactgccaaactcctctcccacctgttggcgggggcagggcagctgtttccaaaggaaagactgtgacaagtggcgggcacacagacgcaaattcttcttttggccttttcgcactggaagagagagggggttccaataaaaatgagcacattagacttgacctggagtgcactttcgggaaggggtgttgctcagtgttttgtagacgtgctcagaaagccacatttgtgagatttgaaggctgaggatgaaaccaccaagagactgctttacagccccccagagcgccccagccctgccacacacagcggcccctgtgaggactgaggtggacgtctggctgcccgctctcttgtctgtgtcccgttcatctcccagaccccgccacaagacagtgctgaaaggcagtcagaagctttgtggttatttgcttaaaactttcttttctgggaatccaacccattaaccttattaccccttgacaatgtgctgacccttccctgccaggaccaaaacacagctgatggtggctgtgtgagacctcatctttgcagctctcaaatgcatgaggaacagagaatggggcattgcaggaagacagcatttctctctgaaggtagttgtgtgtaggtgtgactctccccgcgctctccaggtgtccccagaggtcttggtctatgctttgctcatcactgacaaggatttgccagtgcatagatgacagtgccaccagcagtgaccaagctcacctctgggactcagctgcctggtcagcctgaccccgccctgccgagcacctcattcccgggcagcacttctgttttgggtactggtatctatatgacttgccttttccttttagtgatctcctttctcttcattctaaaattccatgaattattattcatctttgtaattattataaatatttataataataaattatagatagttttgatagggaagaagaggaggaaggaaaaactgagatgatctagatccgtgcatcctctgtaatggcagaagtgttctcgatcagcagccttggaaatgtcctagtcagcggcagcgtcggtgctctggaccggcagccatgggaatgtcctagtcggcagcagtgtcggtgttctagaccggcagccgtgggaacgtcctagtcggcggcagcgtcggtgctctggaccggcagccgtggaaacgttctggatccgagcatcccagggtagcagctgccaaccacatacttatgtaaagcactggaaatgtgtctaaaggaactgtgtttttaatgttattttgtttcaattcacgtcaacacccacgggcagcttacagctgccccattggggggcacacctctagattcttcctctgaagcaaaccctacctaacccttcgtcagagaccagaaccaagtgttaagatggccaaagggagagcatgagaaaatgatgctgtggatccacctagactctcaaagcccagagagtctggttgtacagatgggaagatgtttcctaatttgggaggcatcagatccctgagcaagaggtcagacagtgccagggcagccagtctgtcgggtgtcccagctggggaccctgggcagtgttctgtatcactgaccttctcctctaagatgggggtaagaataggaccttcctcactaggtgttgttagaattaaaccaggtaattgtgtaaaaggttcagcctgggctgggtgcagtgactcacacctgtaatcccagcactttgggaggccaaggtgggaggattgcttgaggccaggagttcaagaccaacctgggcaaactggtgaacccactgcactccaacctgggcaacagagaaagaccctgtctctaaaagaaaagaaaaagacccccttctctacaaaaaaaaaaaaattgaaaattagctgggcgtggtgatgtgcacctgtagttccacctacttgggaggctgaggcaggaggatgacttgagcccgggagttccagactgcagtgagctatgattgcgccactgcactctagtctgggtgataaagccagaccctgtctcaaaaaataaaaaagcctcaagtcagtggttggcacattgcaaatacttgataagcattggctgtgaacattactgatacttttcctagtctgcataacagagtttgtctaatagtgactctacatttatataaatatatgtccatgatcaatcacctaaaacccaccatttggctcatgtagcattgtaaataaagatggagaaattatgcagaaaggcctttgtttattattgtcttagtcctctggggctgctataacaaaataccttaaatggggtaatttataaacaaaagaagtgtcttgctcacggttctggaggctggaaagtccaagatagaggcaccggcagattcggtgtctggttagggttcggtctctgcttcatggagaatacctcattgctacgtcctcacgtgatagaagaggcaaaccagccccctcgggcctcttttataagagcactaaatcccatttatgagggcagggccatcatcacctagtcacctcccaaaggctctacctcttaataacatcaccttggggagttaggatttcagcaaatggatttggggtgacacaaacacacagcagtgataaaagagcagactttgttgataaatccgtgcagggaaggcaccctcactgcagtgtttccagtcactgggatgagaaagggccgatcccagctgagcgtggtagtgcatgcctataggcccagctactcaggaggctgaggtgggaggattgcttgaatcccaacctggacaatatggcaagacccctatctctacaaaaaaaaaaattatgcaggcatggtggcacacgcctgtagttgcaactgctcaaggggctgaggtaggaggatcacttgagcccaaagcaatccagcctgctcaaacccagcctgggcagtatagcaagaccctgtcttaaaaaaaaaaagagagagaagaagactgggcactgtgtctcaacacttgtaatcccagcacaaagcaggtggatcacttgagtccaggagtttgagaccagcctgggcaacatggtgcaaccccgtctctacaaaaagtacaaaaaattagccaagcatggtggtatacacctgtattccaagctacttgggaggctgagttgagaggactgcttgagcccaggagttcgaggctgcagtgagccctggtcaagccactgcgctccagcctaggcaacagtgcgactctatctcaaaaaaaaaaaaaaaaaagaaagggtccatcccggtatcaggcaatgtgaagtgctgggaacacacagacctgcccatggcatcccccagtcacttgaggacagataaaccatcacagttggttgttgccttttgattggagtcatcggcagtgttgtcacgcgactggtcttgctcaggtgcattctccagtgggcactgcagtgacggctcccacgtggtcttccctcgggcttttaccccaggacctgtaacaccaagacagagcccggtgcagcctgcatgtgatgattcgcccccaccctgggtccttgccacagagattgaaataaaagctctctggaggccaggcgtggtggctcacacctgtaatcccagcactttgggaggccgaggaggacagatcacctgaggtccatagtttgagaccagcctggccaacatggcaaaagcccatctctactaaaaatacaaaaattagccggacgtggtggcacgtgcctgtaatcccagctattcaggaggctgaggcaggagaatcgcttgaacccaggaagtggaggttgcagtgagccaagattgtgccactgcactccaccctgggtggcacagcgacattccatctcgaaaaaaaaaaaggaaaacgaaagaaaagctctctctccccacaaccctgacttgcacattttcttctgtaaacataaatgcttctctccatcccccgttccctccctcctgatctgttcttcactctgccttggttctgtcgtcgctgggttggctgtcttgctgtctgtgcagcacctgctttctgttcacaggtgctgggagttgtatgacgctgggcaaactgggagcagcgtgggcatcccggcccaagctcaggggctcaggaggcaggaggcggcactcgcattcacacgcacacgcacagaacgctctcccgctctctcagtctggtccctgggcaggttgaaggcagctcagcatccatctttttccagagaagagaactttggccctgctaggttgctggccggccaccttatggccccaggcctgtcctgaaggcgggggccagattgggagcccccctgcttccgctctgcagccctgtctggctgaatggtgtaaaattccctaagtctttccttccttcttgctgtgtttcaaagaaggaaaagccgggtctgtcagttctaggctctccactgtttttccccttttgaaacttgcaataaaatctacctgtctcttctttcctgcagcctttcttttttcccacgatttcccaaaatacggccaccactctgccgtcacgtgtgcatcttgttccacattagatatggagtttgttttgtttgtttttgagacggagtctcgctcttttgcccaggctggagtgcagtggtgcaatctcaactcactgcaacctccgcctcccgggttcaagcaattctctgcctcagcccccccgagtagctgggattacaggcatccgccaccatgcccggctaatttttgtatttttagtagagatggggttttaccatgttggccaggctggtgtcgaactcctgacctcgtgatccacccacttcggcctcccaaagtgctgggattacagtcatgagccaccatgcccggctggagtttgttttttaaaatgtgtacatgcttgagggtgttaccaggaatgatcaataaagtcagttactgtcatccttaagcccacactaagtgctccggttacatggagattacaccttgccagctgagtcatgcagtggatttggcatggcaggcactaagtatgcgggtagcaggtggggagtgtccaagagaattgtctttgggatggacacagggaagccaccttggccaagtcaccacccctcaaggtcaggtgcggcaaagcccgtcaggcagcaatgctagagtgtctgtctccgagctggcagaccccgaaaaatccagagggttcacggctcctgcaacctacccagtgattcctatgtcctgtgctcagtgcctggctgtccctgtggatggcttcctgtcatggcccagagagaggtaaagagccacctttacctcttcttttaggcaggaagagaagcaaatataaaatacgatggcgcctgaaatgtaccttttctttttattttggggattgggtcagtgcctttcttctgatgagtcgcccattccctcattttccctcactctcctgcggctgatttatttaaaggtgtgtcagcaccacatcaaatgaggaactgggccccctcctttctgctgacggccggccgcgccaataattcattttttagctcattagctaacggaggctgtgaacggtgatcctcccggggattggaatgaggggaggtgatctactgccggctgcctgctcttgaactggccttccttggggaaaatgaaaggctcagccaagacaagccagggatcccagaagtagaattgcggcctccgagtgaccatttgagtctgtgtgctttgacatcatggcttcttagggcaaatgcctctagacggaatagtctcatcgagaagaagccattgtcagcgtgtcccttggtcatatgtgacttgcgtatggagacgctagtgagaaagatgaaggatgctatccagagtatgtgtcagctcaggctgccaaaataaagtattacacttgggtggcttaagtgcgggacattcacgtctcacagttctggaggctggaagtctggagtcagggtgcccgcagggttggttctggtgagacctctctccctggctgacagatggtgccttctccctgtgtcctgcctttcctccgggtgtgctcagagggagagagacatcaccagtgtctcgtcctcttatacgggcacctggcttattgaattagggctctatctttatagcatcatttaaccttaattctcttcctgaagaccccatctccacatacagcaacattgagggttaaagcttcagcatgtgaattttatgggatacgactcagcctctaacatccaagaagcccttaaacatctcaaggctatgggcaggagccaaccagatgttgctcctgcaactctgacagctatgaggtcatttaaaccagccagactccttcttaccccagagtctcaggatcctctgcaccctcgggggagctcacaagatgccagcaggcttggcaagacctctggccaagagcatcccccctaccatgctgagcatgaggagttgcgtgaagctcgtatgtacacacagccgtgatttagaagcctcccgtgcccagcaggccttcggtacccgcggccccgtgccaccagcacttcccccacacgtgccgcttccacgggtgagctcctgtgtgctcacataacattgaattatcagagaggttgttttcttcagtcgtgacagccgctgtttgcaggggaaccactgtggccatggtgtcatccaaatgcgtgatcccaaatcccaaaacagccctgccttgtgtagatgtcactgtcctcatttgacagatgaggaaaagagggtccaagaagttattagaaaggcgaacgtctacaccactaagtcgagaaaaggcacataagccacagtctctctaatgcttaagagtgcagcctgtgagcttagtgttggtggggagattggcttttccctgcctttgggcattgcagaaagtacagggagctaagctttccccctggtatctggatgggagcatccacaggaggtggccttcaagtcacagcaggtggctgacatgcattagtttgctgaagtagcaccaaaaaacccagtgcccttgtctgagtcctgttttcatactagtgaaatttcagctgctaacaagaatcacgtctgatgcagacacaaagcccagtggctgccccaactccctggccacctcctactgtccgagaaaacactgaaatatagcagtcccaaaggactcagaagtcagcattgaaagcttctgtttttgttttgttttgtttagacagagtctcgctctgtcacccaggctggagtgcagtggcgcaatcttggctcactgcaacctctgcctgctggatccaagcgattctcctgcctcagcctcctgagtagctaggactacaggtgtgtgccaccatgccaggctgatttttgtatttttagtagagacgggttttcactatgttggccaggctggtctcaaactccagacctcaggtggcccgcccagcctcggcctcccggagtgtgaggattacaggcatgagccactgcacctggctgcaaacttttgtttttttgtttgtgaaatggagtttcactcttgttacccaggctggagtgcaatggcgcaatcttggctcactgcatcctccaccctccacaaggttcaagcaattctcctatctcagcctcccttttgtgggtttcgggcccacaaaacctggacctaccttttattacatagtttaaacaatgctgattttttttccataagttattggggtacaggtggtatttggttaattaagttcttttttttttgagagagagttttgctctgtcgcccacgctggagtgcagtgacgcagtcttggctcactgcaacctctgcctcctggattcaagcaattctcctgcatcagcctcctgagtagctgggattacaggcacctgccaccacaccggctaatttttgtatttttagtagagacagggtttcaccatgttggccaggctggtctcaaactcctgacctcaagagaaccacccaccacggcctcccaaagtgctgagattacaggcataagccaccacggccagccatgagtaaattctttagtggtgatttgtgagatcttggtgcacccatcacccgagcactatatactgcaccctatttgtagtcttttatccctcgcccccctcccactcttccccccaagtccccaaagtccgttgtatcattcttacaccttttatgtccccatagcttagctcccacgtatcagtgagaacatgcgatgtttggctttccattcttgagttactttccttagaataatagtctccagtctcattggaggtccctgcaaatgctgttaacccattcctttttatggctgtgttgtattccgtcgtatatgtatatacaccacagtttctttatccacttgttgattgatggccattggggtaggttccacaattttgcagttgtgaattgtgctgctataaacgtgtgtgtaagtatctttttcaaataatgacttcttttcctctgagtgggtacagtagtgtgattgctggatcaaatggcagttctactttcagttctttaaggaatctccacactgttttccatagcggctgtactagtttacattcccaccagcagcgtagaagtgttccctgtacaccacatccacgccaacatctaccgtttttagattttttgattatggccattcttgaaggatgaaggtggtatcaacaatgctgatttttaaaagtaaagaacagctcattcaaatgtgtatcagcttgtcagttcggatgaggttgcctatgaggtgagatgtgaggacagagaatcactccagcagttcccggggagaacatactgacacagcgaagggttcaggagccgcaggttcgtactcattctttggctggggtgtgggaatattaaaaagaaattgaatacttgcagttagcactgtagctactagttcagttatgtggtttatccctgggtgatttggcaatgactattaaagtcaatcggagcggaatcaaatagttgtgggattttaatgtctaccaaaaaatgagagttagcaaattggaactggaaaatctggacgcatccttcaccgtcatcccttttcatttaattgacgttttgctccttctcttttgtgatttatgaaatgcatcaacaaacgtttaatacattttaaataaggcctttaaaatagtatcagaactgcttctttttgtctgtctcctgaacccgtatttcccagacattgtcagtgcttttgtgcttgtgtttttgcccgagtggggtgcaggggctgcctccgctgcatttgtgggggccggtgtcagttctcagctgtagccaagtgtttgtcctggaaatctccaaatgaaaagagtcgggggtcactctggggtcactcacatgtaccaggaagtgaagcaaaactaatccagatttactcctggaagaatttgtttgccttagtatttaaaaacagattagggctaacccgacactagatcactaggtgcaatgtaaacacgggtaaaaggtgtaaacaaggcctttcctctgtacttcggaagcagaaatgtcatgggtaatgagttttctttctagactttcgcggaagccctgagtgatttctccgtgtcatttgtaactgtgtactctgattattcccctggagaaacctgaattttggagagggcgattgtgaatcagtgcgttattaaagtctctatgggtaactgcagtcccttcttacatgtagggcttttctttcttttctttttctttttttttttttttttttcgagatggagtctcattctgttacccaggctggagtgcagtggcgcaatctcagctcactgcaacctctgcctcccgggttcaagccattctcctacctcggcttcccgagtagctgggattacaggcgcctgccaccacaccggctaatttttgtatttttagtagagacagggtttcaccatgttggccaagctggtctcgaactcctgacctcaggtgatccacccacctcggcctcccaaagtgctgggattacaggcatgagccactgcgcccagcctcttttctttgtcatcctcatcaaaaaggcaggcagggagcacttccctggctgggcttggctcctgggatccttgtaaaatttcaagagctacttgtaaaatctcacactgttctttgtaaatttcttgtcccccaccaccctacctttttttttcccctctagcggtgctgcagagtcttgagttttcagtatctgtcacgctcttttttgagaaaccagaaaccatcatcagtagccacaaagtacaggagctgctcgcctggggtccttcctttgggtcaacataaacatgccttactgttggtttcctcttctatttgttaagcttctcatctcatcctgtcctctccttcttagccctccccacagatgtgtagcagggtccccatcctctgtagaccccccaggaggagaccatgtattacactggccaggtcgggcagccccatctcagccaggttgtgatgctggggccggggcgggcaggcatcagcatcatccactctccacacctccgaccccatccaccccctccccagctttgtcctctcctctgcctctgggctcagctctggcttctgggagctacctgcctgtttcccaggccctggaacagtttcccccaaaaaactcagccattcctgacattctgtcctttccacttaagccttccccaagtatctggagattccaaaagctgcatctccctgctaaacctcctcattggagtctccaccctctcctgcgtgagtctgttgccatgttttcctcagctgaaagggtttggagaccctggggagtccacacacaccccctatttcggagtttgaagctaaaagcacatggtcacccccaggtgtggggagcgcaccggctgtcccttccccccacccccggcccagctccagccaagtgtcctatagccctcacttacagtcctgcttacagtaaagcaactctcggccccagagaccatgcttccatcgtgcggtccgtgctctcggccccggagaccgtgcttccatcgtgctggtcccaggcagtagggtggtttcccctgtgcatcggtgtgtgagagccactgatccaaggccatggccttgagccctcacttggtagttttctttccaaggacagcttctacactaaaagtgacagaagcagcaccaaggcagtgtatgagcctgagatcagcggctctcacaccttgggcctattggaatcccctgcagggcttcttaaaacaccccgagaggtttggattcagggggtctggggcgtgacctgagaatctgcatttctgggctgatgctgctggtgaggatactgttttgtgaaggtggataaacgtttcccccagggggctttgtgccgagtgaagacctttgctttctgttatttcacttccctctcggcttctcccgaccacactgggcaggggctggcagcctgtgttctcgggcctgatcgtgactgcacctgtctggtggctctttgcagggaagagaaggaacggtggatccgtgccaagtacgagcagaagctcttcctggccccgctgccctgcacggagctgtccctgggccagcacctgctgcgggccaccgccgacgaggacctgcggacggccatcctgctgctggcacacggctcccgggacgaggtgaacgagacctgcggggagggagacggccgcacggcgctgcatctggcctgccgcaaggggaatgtggtcctggcgcagctcctgatctgggtaggtggtcggcacgcctggcagaggacggggccacaggaggcactctctgctttgttctgcttccgtgggcatctttctggcagaaggctgttgttctcgatctgcaagtggaaacagttcctaatgggaaactctgattgaagagcagagggccttacggagagacagccggtcctccttgtacagtacttgctagagtttctgaaaattgcaactttgtgattgccccttatcaagcagggttggtgctatccctcttttttcatttccatcatcttctggagagaaggcggtgtattaacgggatggcttgtagggtttccccatttccaaacctttggtgtttttattcacttaacacagaaatactggaccctaaactttgaggtctgatgtggcaggagtttgtcaaaggacttctttcgaaccattctgattaatttctactggggaaaagtattatttacattcctattgaagcatgtgtcacaatgcttgaaggagtgaaagagaaggataaagtggttgtgcagagaggccctgcctgtgccacccaggagctacgtctgagaagccacgcccacttaggggctgcctgtggacccctggggcttctgctgaggcaggttcccaccagaggcaggcagaaagctgccggcagggaggctccccagatagggaaggcaagtgtgtgcccagaagtggagacagcacccagaggtgggacacccagctggaggctcttctgtctccacccgcaaggcaggatgggtcagtccagcacagcagcacgttctacagcagcatgggtagagtgcagcaggtttctgcatgtttttgatctgacttttttgttttttgtttttttgagacagagtctcgctctgtcacccaggctggagtgcagtggtgcgatctcagctcactgcaacctccgcctcccaggttcaagcaattctcctgcctcagcctcccaggaagctgggattacaggtgcgcaccaccacgcccagctaatttttgtatttttagtagagacggggcttcaccatgttggtcagtctggtctcgagctcctgacctcgtgatccacccgcctcggcctcccaaagtgctgggagtacaggcatgacccaccacgcccagccttgatctgacttttttgatgggtgcagttggtgaatgagtgagatatagacactacaccaaaatcacacagatactcccttttgctcatgagtcatacatgtgatgtaatgcacattaaataagagttgtgtgtagtgtgctagggctgccataacaaaataccacagacaggggtgcttcaacaacagacatttattttttcacagttctggaggctggaagtacaagatcaaagggccagcaggaatggttcctggcgaggcctctctcacggctggtagacggccgccctctccctatgttctcacagggcctttcctctgcactcgctcctggtagctctctcctttccccccacccccttctttttgggacaaagtcttgctctgtcgtccaggctggagtgcagtggcacaatcatagcccactgtaacctcaaactcctgggctcaagcaatccccccaccctagcctcccaagtaattgggaccacaggcatgccacccccatgaatggcagtttttaaaaaattttgtagacttacgttcttaccatattgcccatgggttttgaactcctgcctttaagcagtcctctcacctcggcctcccaaggtgttgagattacaggtatcagcctcccagcccagccttttcctcttctcatatagatactaaccctattgtgacctcatttaagctaatacaccaccataaaggctctgtctccaaatacagtcacattctaaagtactgggtgtcaggacttaaacatgtgaattgttggtgggagcgggggacacagttataaattacaggccatctttgcttctccaattgagcaaaaattcctttgatggcgctggttccatgctgttgagtggcctcagactcccacacattgtgagttggcagaagtggaagtgaattcactctttttcatgagcaaaaagcttaaaaacgttgtgtactttaacctcatattttcccccttctgatcatcactctaataatcaatcacagatcctaagaaagattctatgtgaggacatacatccgggcactgtttcttccagtgacaattttttttttttttttttttgagacagagtctcactctgtctcccgggctggagtgcagtggcacgatctcggctcactgcaacctctgcctcccgggttcaagcaattctcctgcctcagcctcctgacactagctgggattacaagcgtacaccaccatgcccagataatttctgtatttttagtagagacgaggtttcaccatgttggtcagtctggtctcaaactcctgaccttgtgatccgccctcctcggcctcccaaagtgctgggattccaggcatgagccaccgtgtccggctccagtgacaatttttacaaagtgtgcacagttgaggggagagttctgaattctgttcatgtggtggaatactgtatgacttgcatatgtcatgctttttgaggggtggggagacagggtctcactctgttgcccaggctggagtgcagtggtgtgatgtcggcccacggcagcctctgcctcctaggctcaagcgatcctcccacctcagcctcctgcatagctgggaccacaggcatatgccacgtgcccagctaatttttttaaaatgtgtttttttctagagacagggtctcccagtattgctcaggctagtcttgaactcctgggctgaagtgaaccaccgcacccagcttgtgttgtgcttctgagtaatttttaatgatgtaagaaaatgatcacagtatagtaatcaataaaaaatgaaaaaaatacaaattatttgtacagtcttatctcaattatgtacatatacatgtagattcaaagaaaactcattgaaaggaaatacactaattcacaaaggttatctctaagtagtaagattatgggtgattttttttcttcttgagctgttatgtgttatttgtgtatttcctataatgaaaattctgagatcaaaacaatgattttctttgtgcaattggaaagtcaaaatagaaacagcaaaactaaagttatctttgattccttaatgttgcacaaaggaggggctttcagttgaaaaaaaaagacatgttctttccttaaaagaatccgctggccacgggtgcaggctgtgccaccagcactggatggtcctggcaccccagccagttgtgtagctggccccgctgtccaagcacaagccacatgcaagggctgagagaaagcttccctgccccctccctccatcacatcccccatgatactaatgtgggctcccttacctccgcagtacggagtggacgtcacggcccgagatgcccacgggaacacagctctggcctacgcccggcaggcctccagccaggagtgcatcgacgtgctgctgcagtacggctgccccgacgagcgcttcgtgctcatggccacccctaacctgtccaggagaaacaataaccggaacaacagcagtgggagggtgcccaccatcatctgaggaacagccgtgcccgcctgctcgccgcacctgggacgcggcagcctcgccgcattctcgctcagaagtcgcagcacgtgagtcccgtcgcatcccctccctcttcctggtggccacctccctcccgcccacccactctcaccccaaacaaaatcacaaaacctggacatccctcaaggggcgaagaggcggccgggagactgcagaagtggctccttttcataaactcccctaaaccacacacaggagagagcgacgggcctcggccctttgatgatagcacatggcgcaggacccttgtcctggtggcacaagggatggggacgcgagggggaggggaggcgaggaacaaggagaaggggcaactttccttaactggcagttgagcacatagtacatttcccctctaccaaacggaacacttggattccatctcttctctgaggagctcgacggcataaatcagaagcaagcacagagtttgtcaggtttgaagcccctatgatggtgtgtgtcaaatcagttgtagctaatctgtccagggagaatactggcttcattacacttgtacagccgagttcttcccgcattactgctgtttaatagaacgtgattagtcatcgccgagaagaaagcatattagccgaggaggtagtcacgcggcacgcgccggtgattgccacgatgtgattgcaatactcttagaagcaccatattatcccagacatgttctttcaagcccttggagccctctctaaattcactgtcatcatttagtatctgtttaatttttcagtccaaagagaggaaatcagtcgctgagtattatttgactccggtctccttggtgcaaaaacaaaatgggaaaaataaataagaataactcagaaactcaaaaggaaaccacaaattcagctaataatagcatttcgagtatatttcgtaaactaaggaaatacacaaaaggctgttttttccgactgtaagagatatttgatgtccttttgccgaggtggatgtgttagtctcaggccctcctggaccacgttgcccaagtcacacaggcttctgtgttatgtatttagataagatgtgtgaaaatatatttgaataaaagaagttcataaatatgcattgatttttgtacagacaaatggcacctctcttaatttataaattgaactggatgtgaactaataatgtgcaactagttgagataagagggttacagatcattgtacatggaaaatattcccagcagtaaacacttccattaatgtgatctacggcttttgaaaaggagcatctcagaataagatggtggtacaatttgcttattaaaattgagaaagaaaaaaaaagacacactggagtatattagaaaggaaaaagaaggaatgtggtctctcatgattgaaagcatgatttagatcggatacggcttttgctaaccaaggaccaagggactctggcaagatggggtggttttccgaatgccagaccgaggtgccttacgaaggcagctgccaatggttctgtggcacagactggctcctgagaacccagacgaccttgacctggcagcccggccctccacgctagtacctcgcctgattttccatcgttgcggtatccagccgcttcagacgtccgccgccttcagtggtggtagtcaaatgtagtcaaccaaaccacagcatcccttaggttaaaagcaaacggggcagctttgcctagagctcattgacagtgtgatggggggagaagggttgtcacaatggaagatgaggacactagactcatgtagcacagaaacatgaagccacacgcaccggcagcctccggggtgttcctcgctctctcgtatgttaaaccttatattttataagagtttttcctcttatttcactttttaaaaaaaattaaagtaggtggggaaaaaaataaagctttacacagaatttatatgtgggtaagtgtttcatggaaatttctaatcttaacgaagctaagtggagctcactcgtatccaaaagtataacaggtgcagaagccacaagtctgagaaccttgacgacagttccatcgtcctgccatttgatttttcagtctgcgtttcatcactgtgtagctattgtaaatgtgaatagaaaaaaacaggtcattgcctatttttgaagaacgcgttggtgttcgagtccactagacacactcgctccacacagccttcaccgtagactctgtagtggacacagatatagcataaatgaaattgttaaattatttcattgtagttaattcccactataggaatgctttatcatagtgaagtttcttttgagaagaaacggaactccttgaggcttctctttgggatgtatatgagcgtgtacatattattctatgtgtttataatataatattttcccaaatgacttcttgtttcactttgccttccacaacctgaatgccagattggttttttcccttcctggcccccagcacaagctgccatgactccccctcagaaaacacagcccctcctctaccattctcagtgatgtccatctgctccactccgcagccactttctagggcccaagttttggtagcagaaggaaaggcagtttttgagggtctttcgaaaaaaagaagacggggcagctttgcccagagctcgttggcagtctgtttgtatttcagtgtctaaccagaagtcctttctttgcggaccgcactctcgttcccactttcaagctaattaccaccaaggctgggagaggcaaggactgggggcggagctaggaataactcgtttgagaagggggtggagttttcgttgttcatttccatgttcagttctgtgacgtgacgatgacagatcaccactgcaggatccccctcacctttcctgttcagaattaaaactctcccttgatgagaaacagccagctgagggaggcccacgagcggcctgtgtaaccccatgggtgatctggacacatctgcacccccgcgttcagcttcgcggagactgaacttggcggggagtggaggggtgtggtgcagacctggctgcagcagaaacaccccgcagggacagtactctgtgattctgacctcaggtgctgggacgggcagatggtttcccccgcccagcaccccagtcctggtccctggtccctctctctgtttcatcccaggaaatgagcagctcgagggtgagcaagtgacaagttcctgagtcactggccccaaaaccaggtgcagtgtcctgtctcccaagtgtgtgcacaatgtatatatgcactggaaaggagggagaaggcagcgggtcactcgccaatcgcagggttctcagacacaggagagagcgggatcttaatgaattgcatttcctgcagagcctctagtgcacaggccagttctcggcagtggcttttcagcacaagggccttgcattgaagctccctcttctgagatttcacccagcctgatgaggcctgcatggttccggcctcgtcatccagtgtagataccagtcttcctatttttgtgacatctgcacatttggggtcattccctatatctgcataggagctattgctaaccttgttagggagaaacatggtctaatgagaaagacagacccctaggctcagctggccctgccatccttccagaggattcctctgcaactctaggcaagcacccagcttcctgggctctttttcctcatctgtgaaacttgcagggtgcagtgaggtttcaaaccagtgtgataagtgttggcctcacacctggcccaggggatgctgggagaacaggagcacttgttaataacagaaacactgatgggaccgaagccagtgcacacaccaggaaacctgcccgtggctgacactgtcctccagcctgcattctggggaggctgtgatgggcacgtttgccaaccccccccccccagtagagcccaggaccctcctctctcagcttgccagtgccctgccctccacatggcggggaacagcatcaatgaggtccttgctccctgagagcctctctggaacctgcccacttttctcaacatgtatattctgctttgtagtctgaggttgattttctagaggcgaggaaggggctgagttctgccctcgtgctgttcgctggtgctgatcagggccaagacgacccttccctctcccccacagcctgttgaggtgccgttgacgtggacagcgcccctcccttaagatgcccccttgccgttgccatgagccgctgtgactcacgcgtgcactgggccttgcttggtgctcccctcctcctcctgtctgagatcggagcttgctggagagcaccccaggtcgccgtgcttggctgcaggcccgtccctctctccccatcctcgggttcccagcgtgttttgtgcttgaacttggtggactcatcttaccccacaagagtggcctgctcaacctgcagcctccaatgtgccgtaggcgctctaggtccccgtggcgcccaggacaccaactctccctccctgcacttaggatgttctggaaatgagaggaaatccacattcctgccccaggaggtgggaagcctggcaacgatgtagcttcccctgagatgcggtatgatcaggcctcagcaactactcaggaggcaaaggtgtttggaaagcaaaccccaaacctcccggcacggcatgtgctctgcttccgtccctcaccgcctgcacaaggtcgttgagacttttctagaactccccggggttgtatttatggccttcaagcaaacaaattgaaaagcagtcaaggaggagttcagatagaaaagtgctggagatacacatctttccttcaaaggaaatgtaatttatttccaaccgctgcctcagacgggggtttcacatgttgtgaagtcacatcttgaatgactgtcaccctcatccttccccaaaaagctaaataagggcctttggcatcaatgcgtgcattctccacctttccgcggcttgcgcttggatttctgagtggctttcttcagggagcccttgtggtcatgtgtctttaatgctgctccccatgcccccaggccaggccagcacgctcaggtgatagcgagtggggccaggagacccccctgccctgcccagtggacagatctgccccagccctgctgtggggacgggccctctatcatttaaccacatacattaggttgcttttcagcaaaatgtcagctttcctcccattatgcaggagagagaaggggcgcaggtgtatctccttagagtacaccttggagctggatcactaagaaacagtcctcagactggtccttccgacacaggcagagagtgaactggatcgctggcccctgggatgctgcgctgtctgtgattagagagaagtggccagtgtcccgtctgtgattagacagaaacccctgtggcagactcctcccctctccatgaagaaagaaatatttacttagatattactgtttcaaaacacaaactttattccccttagagaagaaatactgcccttaaatagactgttgaaatattaatggcccccccatttaatcagtgtgtctgcggctttcttcgcgtcacatgtccgcattggcaggtgattctggaaagggattctgggaaaccaacaagtcttttttaaatctttgagttgtatgagaaagtatttaagttcaccagtgtagtaaacacccaccccagagcagcggtaagcaaacctaaatctgaaaacccattcttactgtctttcaccatgagatgctggttttggtgtaaaatgacagcacttggtttggggttttgcacctgttgggtagaactgttcttgtctgaggtcctcaccctctacagatgggcctcagggcctggaggtgggcagatggggccagagtggccagcagagacttgcatgggctctgaaagccccagagctcaggcctaaggctgctaggtgagaccagcaggcagctgtggcatccgaccttgggacgcccaagctgggcagccgctccatgtgccccaaacaggatatcctcatgaatgtgaggagaggctggctcagggcttggttttcattttggcctggcacagggtacctgtagggagcactcccccaacctgaggatggtgaaaccatatgatagagactccttgtcgaagtccacatcggactgatctagaatgccccgtggggggattgcatggcctttgccttgagatgcaggtgaaagaaaggaaccaaacaaggcatgagtgtgttggggaatcttcccagtggagcaaacccccttaacacaccagctgttgggaacagctgcccctaaatccaattaaaccctcatctccctggtgctgaacagtctacactggcccaggaagctaacgtctgagccgcttggagagctttggtaaacagaagacactggaagcccactcggtcagcagctgggcatgaggatgtcaggggcctttggacttgaggaaggacagtccaggtgcatggaatcctaatgggcctcatgcagacactggaagcagcccagccccctgcccaataccacagccctggggtgtcccctgacattcctggaggtccctgggcaaatgcatttcctgcctgggttctcagggtaggagaacagagaaggctccaagggtgttgggagtgagccaggggctggtctggggagtgggtctcacgcactgctcaggttggcacgagggacctcccccatcccaacccagccccaagggtcccagcagggctctcagcatggctgttttgagggtacacaggtggctggagaggggtggggcagttgcatggtgggtggcaaagtgtgcatttagaagctgcttcgtggcgttaagaacggggggagagggaccagcactgtaacgttagaaataattccttcttgcagacttgaaaagcatcagtttccctcccacggctgggtttttgtgtctgaaatacatctaattctccagactgcagcccctctcagccccgagcacctgagcgctggggaggcccttattgagctcagcctggagaggggagggtcgcacgggtcccgggggcaggtctcctgcactggctcttcccttctgccagcttggaatttggttctcatcttgccacaggggtgcgtttcctaaagggcagccggagcagctcaaaggtgacaactgagatgcatttctaggcaggggcagggaaggccaacccaccttgcagccagttttctgtttctgtaaatagcagtgtatagagatggaagggcagcgtgggtgtatccacagatgggtttaggttttttttttggatgttttctattacctcattcagcaactttatgtttcacaatgactcaatgatgctttatttatattgtttgtactgtaattaaaaccattgacagacatttcactttgcttgttatttcatatgatcttgttttgattaaatatgccagtttgtattttcctgccttgggatttttttgtgtccgctgtacagtattctaagggaaaaagaaaaagaaagatgtgtaaagtaacagagagaggtggctatggtgtagagacctctttctaataaagaaatgaaaatatgtctacaccgcttccgtggagttgttgttttttgttttttgttttttttttttttggtggcgttggtcatttgtcacaactaattgtgtttctaagcccaggaaaggtaaatcagagagaaaaggggctctgtctgctgcgggcagggattgccccaggcccaggctgccccaggcccgagggactcagcacacgagttcacagacggaatgaagaaagagaccaggagtgtctcttctgacttcttcctttacaaggacagaaactccaagagaatgttctttgcccagccagggttgactgggcccagaacttccagatgcttctgtatctttgcactgtgccacactgccccaggtgtgtcgtaagaactattcccagcaggtggctagcagtagaaccatcccaggactctattattaagaccgttattatcattaatattactgtaatttttgcctacaaactacattatatcttcccctccaaaaaaaaaaaatgagaaaactgaccaggcctggtggttcacacctgtaattccagcactttgggaggccaaggcggttggatcacttgaggtcaggagttcaagaccagcctggccaacatggcgaaactccgtctctacttaaaatataaaaatcagctgggcatggtgggacatgcctgtaatcccagctactccggaggccgaggcaggagaatcacttgaacccaggaggcggaggttgcagcaagtcaagaccatgccactgcactccagtctgggcgacagaccaagactccatctcaaaaaaaaaaatgccaccactaattttgggaatgccttccagacagtcttctctgcaaatacaggggtgtcctcttccccctactcttccattcaagaaatagagaacctcgtgatctcatgacacattagtgacattttttgttgaagttttcccatggtgtgggagcccatagtgccacaaaatgcctcgtggacggccacaacatggaatgtgaggccacagcgagggcagcccctcacccagcacagagacctggtcacctgccgtcacaggacacccacaggcctcatgcacaagggtactgggctgacttgtcttctaagaaatgcggaagaagaaaaagcacaaggaaaggtgcttttaggaggaatcaatgccatttaagtgcatatagatggccgagcacggtggctcacgcctgtcatctcagtactttgggaggccgaggtgggcggatcacctgagaccggaagttccagaccagcctaggcaacatgccaaaaccccgtctctactaaaaatacaaaaaattagccaggcgtggtggcgcatgcctgtggtcccagctacttgagaggctgcggtgggaggattgcttgacgcaggaggtggaggtttcagtgagccgagatcatgccactgcactccaacctgggtgacagagcgagaccctgtctgaaaaaaaaaaatgcatattgcttatctgatgaatttaata

SEQ ID NO: 18 - DNA, 20868 bp, Homo sapiens
  source 1..20868: mol_type = genomic DNA
tggactagtgcttactgtgcatgctatgcttacgttgttttgttttgaagtgtaaataggtagactcagaaaaccctgcttcctctggtccatctgcgccccctgagggagggatgctccagctggacaagagcttagacactgccttgagggcagcagtagtcagaatgcagctcccagaccgcacccctcatctcccaccagcggacccttgaacaagtcacttaactttctaaatgctgtttcctcattggtaaattgtggacaacagtactggctttttaagatggttgcgaggattgaatgagatagagtgtatgtcgtgcttttagcacagaacctggccccaagtaagtgctcactagctttctattataagccaactcctgagttctgaaaagactgggttacttggaggcaagagtctcagaaggagtccccaaagctgatcagaagctcagaatgggaaggggctggggcaggagggctgtgctttgatttgctggggatggagtctcagcatcaccagaaagcagagttctggaaatctcactctgttaatcattttgtactttcaatcgaaattcctttttcctttcctttggcttttggcggcagcactcccatggtgaaggtcggtctgccccagctgtgctaagacaaacaaaaggaggggagcagggtgtggcagatggcagccagcagggctgcagggagggctggcggatggcaatagggcatcctgcatggcagggcatccaagcaaggcagcccagggtgagctgtgaagggggcatgggcacaaaggggcagcagctctccttcacccacccagggagtccccttctgggctcctattttgtcataacctggagggcttgatattttgtcattccatccactaccaccctttacatctcccccgcaagaccaaagacactccccattaagacaagaggcaagtggattacttggtgttgggatttgttgtgaggtttgctgacaccttgaccatttttcactggctggaaatgaaaggaacttcccacttgctctttgaaggcaatttcattctctccagggtccttatttccttcccatattctctcacactcccaaacttctgaagaagggagcaaactttggccacgaggaaggagtggagctgaaataagagagtccagggtcttggaggtgaagggggaacggccaggtcctctagtccaatcttctttgctacctcccccctcttgtcgctttgcccagaccacacacctgcctctgtacttgtcactgcacctgcactgttgaatccacctttcctgggtcacgccgctgtgctgggtggtcacagcctaggaccctgtagagccgcagcctccatgtgaactggattcaggtctggtgctgtgtcctcagttcagtggcacacttgcagctgaacctcttggggctggtgggcaccaagggtcagaagcaattctacccaaagatgctggtgctaccaactaactcctcaaggtagataacaacatatggctgtgcccaacctgcactggctgctgacccaaccctaccctgtccagcccctctacctgagtaaacactttcagctgccctcgagaaatggtaggattggctatgtgctgagcctagtggcactgcagctcatggaggcagcaccggcttcaggccgctgtggccttggtggtccctttgatggcacggaggtggataaatgcctgcatcagctgacactgagtttgtggacaccagggacctctgcagctagctgggaaatctttcccaggaggtctcccaccccttccctctggaacaccccctgacgaggccaggggaggaacccctactctatgttctactctggtacctagtgctcacggtgagcaggctggctcggggcagccctcctcagagctggagcgcctttcaggtgccctctgaacagatactgttcagaatacagataaacagatgccaccaaggtcccctagctgtgcagtggaggggcaggtttcaaaatcagatctgtctccaaagttcctgctcttaaacaaagctgtcccatcttcccacccctctccatgggcctgtcctctcctctaagtaccatatcccaactctcccaggactggcatcatcttaagagtcagtgccttctctgttcccagggtccccactgactccaacctgcccacgtcctccactacatgaacccagaactgttgtacatgatggaaccacctccatgcccatgggtactgtcctgccaccagccccagtgggaggcacctctgcctgtccctgtccaaccccagtaccccatcttgaccaaggccatgccctgacctgcctccaagaacagaccagcagctcaccccctagacaaaatcacttcctctttaattgctgttgaagaagattcacaccactgcctccaaggagatgggggggcatttcccccttgcccccacctctctcccctccccaattacctggtcctttgcaaactattttagccagaaaaaaaaaaaaaaaaaaagaccggaaaccactgacacagacagcccaagggctgggttggctgagggaggcagggctgggccaggtaagtccgccctatcacccagtttgtggggaaggggcagggggcctggaaaccctcccagccacctcgaatcctctcagccctggctgggagaggtcacgggggtgaggaatggctctggagctgctccagtgggagggaggggctggacagaaagaataatgggggaggggtcccactgtaggggtgccccctaccccagatcaccacgggcgctgcacagtcacaggtacgcagtcacggtcacagacacaacccgagagcacccccaccccaacccaccccctgcccaccctgggcttcccctaccccaaaacgccctccccacgcccctgcccgcccccatccccatgttggggaacaaagcaataaattacaaggcccccgcagccctcttagcccgctcctgctccatcccttctccctcccaagatagtagtgggagggacccaggctcttggttccccccggactctttagcttccacccatgggtaggtgtaggggacgtcctggtttccactactcacggtccctttcacggaaagggttgggaacccccacccccatgagcagcaggggtcctgcccctcgctgcccttgcccccttcactgggcagtgagatgagcatggaaggggtagggtttccgtattggccccaagtcccggggctagccctcccatgtactaaaccctccctctggcgtggcgtcgccccaggagccagcctgggtatgggctcccgccctgggattgttgagctcgggcaggaccgggtcttctttccgcccctagggggcacaagcgggcatgtccaagcgcctaggagcccgtaccgctggggacctccccttccgcgaaccccgagcgggtagacccagagcaatccgagtgtggaaacaatggagagggggcgtgttgagctggggtctccatgcctcgttggggagagggaggtgagtttgtgtcttctggaaggcgtgggggctgtgccctcgtgggggtaggaagtgctcccgtggggcggggtgcggatcggagaggtgagtgggtgcgtctgtccagcggtccgcccggtgtggtcgtgcccggcccgcgtggggatgggggtgtctctcccgctgggcaactataccagcgcaaccggggcgtcggcgcggcccacgctagcggcgctgctccggcggcgggggctgggcgtggcggtgatgctgggcgtggtggccgcgctgggcgtggtggccgcgctgccgccctcacccgggcagccgtgctggagaaggatgtcggcgcacagctggcttccagcctggcgggcgtagaacagcgccgtgcggccctgggcgtcacgggccgccacgtccgcgccgtactagagggcggaaacggccgcgtgaccgcgcgtccccagggcgcccacacccggcgccgcctcccccacatggccaagcctacttccggggtccctctgggaatttcgggctttcccgcgccaggcgttttccgagatgaagcctcaaagaccccctttcctccccccagctcacgtacccacagcagcagttgcgtgatgacgacgtgggcgagctcggccgccaggtggagtggggagcgcagctgtgggtcctctacgctggtgtcgagcggcccgtgtcgcgcatgggccaaaagcaggagaacggtagccacgtcctgggcctgcacggcggcccacagctggcggcccagcggctcctccgaggtgctcagcggcgccaggaacagtagctgctcgtacttggcgcgaatccacgactcgcgctcctccctgcaagaccagggatcaacggaaaaggctctagggacccccagccaggacttctgcccctacccacgggaccgtctcaggttcgcacaccctcagcaaccctccccccgctctgttccctcacgcttaccgcgaagagtcccgcgagggcttggcacggcctcgcgtgtcgctttcccacacgcggttggccgtgtcgttgccaatagccgtcagcaccagggtcagctcccgtggccagtcgtccaagtccagcgagcgaacgcgggacaggtgtgtgcccaggttgcggtggatgccagaacactcgatgcagatgagggcgcccaggttcaagctggcccacgtggggtctgcggaaggagcgtagaggtcggctcccagccgggcagcacaggcaccccggcattcactacactccctagcccctccgctgcctcctggcactcactgggggccccgcagtccacgcagattgaattccccttggcgttccggatcgcctggatggccacggcctcgctttggctgtctgtgcgcagctgcagagagggtttgggttggcactgactctgcctccaagccccacctccttctcagacacctctgctctcctctcacacgacttcggccgtgtcgttgccaatggccgtcagcaccagggtcagttcctgcggccagtcctccactccacctcaaactcttaccttgaccttgctgctctcacagcattgcagactggctaggatctgactctcgatggcctggacccaggcatcccgctcctcaaaactggctgcctcaaagtgccacgtctgacccgtgctggacacgatcaggaactcaaagttttcctctgagtgggggatgggatggggtcattaagggacagagttcaagcaggggctgcctttcccaagaccgtcctccctgatgtccatcccgagcccctgggagtggggcagtgggggtagggaaagcagagggtggggggcagcaggaagcccgagcacatgcaggggaaggcgggggcacccccacccttctgcaccccagctgagcgcccctcccggctccccacttgttacctgctttataaatatttcttaaactaccaaaggattttagtttccacattttgcgcttggctggtttcccgaagcgaaggagatagagatagaatggagagcagaacagagaaagagagaccaagaaagaaggagaaaaagacaggtagatggagagatggagagagatagtgacagagtgccagagacaaagcaggacagacagatggggagagaaagcagaactaaagtcagtggccccggagcagagtggaacagaagccaagagccatgagagtaggcagatctggaacctgggtctgagcacccggcagagagcaggggcagcagggatgggttatcaagaccagcgaggagctggacctctgggagaagaagggagggtcaggatctgagtgaacacgggggaaggggacagaagctggggcgcagggctgagatgagagggccctggggctggtggcggtgggggtgcggggaatcactgagggacaagaatggggatcactatggtcaagggctgttggggagcacttggcaatagaaagttatcgggagaaggccgggcacggtgactcatgcctgtaatccccaccgcctgtaatcccagcactttgggaggccgaggcgggcagatcacgaggtcaggagatcaagaccatcctggctaacacagtgaaacccagtctctactaaaaaatacaaaaaattagccgggcatggtggcaagtgcctgtagtcccagctacttggaaggctgaggcaggagaatggtgtgaacccgggaggcagagcttgcagtgagccgagatcgcaccactgtactccagcctgggtgacagagtgagactccatctcaaaaaaaaaaaaaaaaaagaaaagaaaaaaaaaagaaagaaagttattgggagaaggggctgggtggtcacagaatccaggatctggggaatcagtgggagatgctgagataaggggctgaatcactggggatcagcggggctgccgggtgcaggggctggggtggtaagtggagttgagggaaggaagaggaactagaacgtcattaggagagggagcaggagctatagacatggacatcgttgagaacaggggctggggaaaggaattagctggggaacaaggaaagaaggacaggggctgggggatgtccatccactctttcactaagttgtgtgcagtggtaatggtagtcaagcactcagctcaggcacttttcctcctgctgcaggagttaggccagggagctgatgttggggatgagggttctgggtgggagtggaagtgcctgccagagcctcaccttcagcctgcccagccgagccttcagtcttggatggtgttgtcaattttttcctcctctgcttcttcaccatgggagaaggagggggttcccgactcagggggctcaggtctccagatggggtacagtcttagggaggaagacacagctgcctcagtagccccctccacagatttcctgatttcttgatagcctgtctcattccctgaactagctttggcattttagggctcccctcctcaactgtccctctccaggagttcccccttgatcattcctggggatgcagggagatgagaggtttagagtcagtcctgcactcagatcctggttctgccacttactggccttaagaccttgagcaaggcacttaatcttctgagcctcagtttctttatctctgaaataggggtaataatcttgacctgacaaaactgttgtaaggatcatttgtttacaatgttatttgcatactatatatatatattttttttcaaacatgtcaaacatggctgactatgtactagacaatattctcagtttgtttaaacctcaaagcaaccctctgaggtagaaactattatctccatgttacagatgaggaaactgaggcacggagaggtcaagtaacttgcccatgtggcaagccaggattcaagctcaggcagttgacgttagagtccacttgtcttaaccattatgatagacatggtatgattgaacttattcatgtgtggggctccatgtgttcactcatgcatttattccagcctccaagccttcaccccatattcatttcccacactcatcctatttgggtgtggaagacagcagatggaaggtcatccccactgacccgtgctgagggctcgggccaaattccggtctggcttcagcaggtgtttggatgtctgatctggtggtggctgcagggaactggggctggggctagggcttggcatgggagtagtggcttctgtcggaagaagatgaaacctcagtgagcctctttcttctggccccattccttatgtggtccctctttatcacccagcttcctactcgcccagtgccagccccctcttccctcttacccctctttttccccagccctggcccctcttctgctcctatgtcataaaccttactcacccaggccttcacccatctggacagtgctcatgtccttgacgagcccgttaatgctggctgaggggccaaaggcagagatggccctcgggggccgcttgcccgggactttgactgttgttcgcagcaagtccatctccttgccgtgggtactgtggatgtaatcctggaggggtacagggccgagagtgtagggaaggttggggtccttggtatgctgggaagcagtcaacatggtacagaatagagagggactggggaggggtcttgggggccaaatgggttgtgatgaacatctaggggatgggcccatcagacttggcccagcaattgtctcctccagaaagcgttcccttcctgggtgctctcccactagactgcaagttcctggggcaatgtatttacctttacattcctggcatgggcacatggtgggctcttaacacatgcctgctaaacttaagagaagaggactagcacttcctagaaatgaggttagtgctttgtcagaggcatagacaggtagaacttgagggaaatccaaagctggccaatgtggcccagtctctgccactcacgttaatactggggtggtagagtagaaagccattactggacagggttacatatttcttcttccattctttgttcaaggaattgccacttcgttttagtaggaagctctggagaaaggggaaagacacatgtgggaaaaaagccaactaagaccagctgcccctagcctgtcccagcccctggatcactcacctgtttgatggggatggctcgcccactccctgttgtctctccccgactatccaagcttcgtttctcggagtcactaccccgacgattctggaatggttattggaatcagtttgaggatggatagagggatacactgatgtgacgatagggaagatagatgaagaagggcccaacagaggagtctagggactagggaagatgggcaggtcatgggggacaggaggatgggggtcagcatgtccatgtccaataccgcaaaaaggctggtcctgcgcttggctgcccggtgcagggaccctggggtgctcaatccagccactgcagctgcctcggctcggagctcccggtgaccaacattcggtgaggacgggagggaagaagagtagtcgctagtgtggcccccgttactagcctgggcacatatggaagagtcagcagagctgagatgccccctactccaccaagctacactcatatctcgttatggggaatttgagacattccttgatcacctcaccatttatttatgttgtcattaataatttttaaaatcctcactaacattgtgacaatgctttaaatgttgtaaaggttgattcacaagtattgtgtcatacaatcttcctgatagccttgggaggttaggtgagttgcttaaggacactgcaaatgatgtctcaaatctggttgatttccagtccaatgcactttctgccaatagtttcactgccatttccatctgtttccccactccctgaacctccttgggtactctgtacctgtcctaggatccccagcccctctgcatcttaccggcccctctgcagactctgaaaccccaactcacctggccagctaccggagtggatgcagctgagtggcttggggagctgggcagggacttgcaggcagccagaagctgttgctgcttgcgcaaggtcaccaccttctgggccactgaggggagttgacggaaggaggtgtgagcaggccagatacccaagaccacccttccatgcccagctttgagaaatccccagtagacaacacaggacccaacttccttgtcactgtggcctccatgccacctgtggccttgccagctcctccagcccagaaagaccttgcgactattaagcaaaccttctctggcctccctgatctctcctccctcccacaaaggctaatttcctgtcactcacagagagaggcctggatgcctgaccactgagaatatcccaggccccttgctctggcttcccacatatgctggagatcactacactcaccctcctggaagacccgatccacattgagcccataggttgcacaagtctcatagtagctgcagcgtttcatgtccgcgcacagagctctggcacgagcatctcccaccacccgaggggaggaagcactgatcctgtctgaggggacaggaaaggggcaggattgaacaaggagccccaccttgttcgatttttcacaattcccttatccttgcactgggccctcaggctgggtccactggggatggggtgtgagagatcatcttttctgtgaccaggtggaatgggagtacataagccctttctgagtactgggcccagttcacacacctagctgggtgagctgtgtgtgtgtgtgtgtgtgtgtgtgtgtcctcaaggaatactccagagctgctgagtggtgcttcctgacaaggtctacatagctgagacccaggcgcgagcgacaatcaccctgccctgcaaatccatagaaccctgaactggtgggaggacaccagcttgtgaactaggaaaaggttgggtgcccatgggtcatggctggactgcccactctgcagcaagaaaccaggatgcaagcaacaggtggagataggcaccagcagaacaggcatccagaccaagtcccaccagctcgacacaggggagtgctggaaaagcatttcctggccctggcagagtctgggagcctctgagtcacttctctgagaactaaaaggttttctgctctcttcttttcatcatcatttcctttgtgttttcactttgtttttggataagttcctttaaaaggtgtcagccttacccagctgtcgcaaaaaggaagatggaaaaggtttcctatccaccctaggacttgagattttctgtgtcctaggatggtggcactaggaaatggcagtgtcagaacacaaggtaggtgacatttcaggagaggcaaggagatggctactatagctgtcctttcctccctggagatccccttttctctgctcagaccttgggaagttattgtttggtttcatgactcccttatttggagaccaggctccctccagaagggtactataatccaagtggccatttccacaccttaccaagttctcacccatgttgggcaatatcccagtagcctccttagggcctcccttgaaagcagtgctttcctaacccctccttaccttgtgtccccaccagtgccaaggccaggcctcctcgtccctccccgcgaagggaactcagctgcccatggagacggctcacagcctggaaactgttctcatcctccaggctgaagacgaagatcacagcatctgcccagcctgagaacttgcggggagtgagggagcaaatggaaagtcagacaggtctactcctctggacccaatccagatgaagacctgggaaaccagagccctctcctttggccagtgctgaccccagccagcctgtcccccaccacctccaccctcaccttggcatcaggtgccccagcttcctctcggattagcaccagatgtgtctgtccatccaccaacatttctttcttgtactgctcacctgtccagaagagttggaaggggtaacaggtcagaggtgacaggtcaccaaacctccccatgctcccagtgcttttgctattatggcctcatccttcccccctggtctccacacctgcctaatcattgatctcactcctggatccctgaccccaatggttagcttactatggctcttcagaactcactctctgtcttctccagcacctggtatgagccagtcaggaatcggtggatgagcgatgacttcccactcctggcatcgcccagcacaccctgagggcaaggttgtggagcagaaattgtgggatataagagaaggcaggatgcatgggtctggacactccagaaaacccagagagataagtcatccaagcaggaccctacagggcctggatgacagtcattccagagagagcagttgggaggatcagagcagctggggggatcagagcagttgggaggatcagggcatgagtgtggtaagaaatgatcccaagctcaaagtggagcacgagctgaagaatgtcagcaattcagtaccagcttttttgtgtgttgggttgtttagaaaacatactagatatgttgtgtgtgtgtgtctctgtgtgtgtgtgtttgtagcatgtcacagctctaggcactagttggaaaactttacccaattctaggcagtacaacatgaaggccaaagggcagataccagaaatgagaagcctggaggaggaccatgaacaaacaggaaaaaggggatggctgcataaagactagataggaaaaacttgtgaggaggctgtagcaaaccccatgttggtgctatgaaggcagactctcaggagaactggaaaacgattccctattcccaaagagagagagagagagaaggagaggtgaagggagagagctgagagtgcagtgggtgggaggtcagccttccctataggcaaggggactgggttacctaccaggcgcagttcaggaatggagcggctcaaagtccattcctggctattgatcacagcctctgtaacgggagaagggcagtaagaggggaggctcctggctcagaaggacccccaacactgagccacccctcctccctctgcagctttccaacccccccccaaccctgcctgcactggagaggtgtgtgcaacagacaggtttgagggtggtccccaggcctcccatcccagccactctcccccagctgttgctgccgctcagtggttgcttagcaacggagctagcaagacaaaaatacttcagttggcatctcccttaaagcacatccccaaacgcgggtcctggccccagacagggagaccagggctctgacagtggcaggttcttccctctggaaaaagaatagaagaggagctcctccctaacccactggttcccagggcagaccctgggaggaggtgctgaaacacagaagagagtgtgtcttccccaacctccattccacaggagagaaactgaggtgaggggtttccctccccttcttcaaggtcaacggcactgtagccctggacccctccccacagcccaagggaaagagctaggattttcctatgcctccatctcccacaccctccccacaaacgccctccaaaagaactgtggggaagggctccatcgcctggccgagagaagccacaggcccgggggaaaggatgctccttccgccagccaggtccagcccccgcgcctgacaccggccggacgttcccggggcgccgcagctgcggcgggaactctgggatccggagccatctgctcccacccgctccggagccaaaccccgggggccgcctccgctcccggacccgcctcctctcccgggagtgtgagccgaaccaagagtctcctgcctatctcctccagtaggaaaatagtaataataatagacaccctgcccccgtaaaaaacactaccttccccgtaccgcctcccaagtctcccggggtacggattgcctttgcagcagttccgccccacctgactcactccagggtcagccccgggtgggtttcaatgcggctctggggagggggtgggcagtgggggaagtgaggcttcctatccgccccctctcacttcacatttaaatattctgcacgttccagcccccgcggactcgcgtaccgcccaatccgccttcaccgcacgaaaaacatcactagcctgctctcagcccaggggacgactagtccctggcgagaagctgcctgcaaggtcactgtcatgccacctgccccaagtgctcaggggaaactgaggcttcctcatccccttcaccttcaacgtcgctctaaacacggcaaagccccgtttccatgctcccagagttcagctgaggctggaagtggggtcctgggcttctctgggagcaattttctagtcactctgatcaaggacgttactttcccagaaagctctgaggctgagtccctctgaaatcaagtcctttctcctgtcgcacaatgtagctactcgccccgcttcaggactcctattctttgccccaatccttgacagaggggtgagcttggttcatccgcccaccccagagaaaagcttccctagtttcctggacctcgctcctccaccccaagctgagcattccaggtacccttccctccctgttctcaagccctgactcaactcactaggggaagcgcggagctcggcgcccagcagctccctggacccgctgccagaagacaggctggggggtccgggaaggggcccggagccaggaggccctcctgtgctcttggtgaagatgccgctgataaacttgagcatcttgcggtcacgagtggatgctcggcccccctcccggccccgtttcagccccggagctggaggctccagagtgattggaggtgcaggcccggggggctgcgcggaagcagcggtgacagcagtggctggactcggagttggtgggagggttagcggaggaggagagccggcaggcggtcccggatgcaagtcactgttgtccaaggtcttactcttgcctttccgaggggacaacttccctcgggctccagccccagccccgaccccaccagaggtcgaagctgtagagccccctcccccggcggcggcggcggtggcggcggcagagaccgaagctccagtcccggcgctgctctttgaccccttgaccctgggcttgccctcgctttcgggccatgacaggcggctacccgcgcccttgcccccgccggctttggctccactcgtggtcacggtcttgcaaggcttgggagccggcggaggaggcgccaccttgagcctccggctgccggtgccagggtgcggagaggatgagccagggatgccgccgcccgcccggccttcgggctccgggccgccccagctcgggctgctgagcagggggcgccgggaggaggtgggggcgcccccaggcttggggtcggggctcagtcccccggagagcgggggtcccggagggacggcccagagggagaggcggcggccgggagcgggggagactgggcgggccggactggccggagccggggacagggctgggggctccgcgcccccggtgcccgcgctgctcgtgctgatccacagcgcatcctgccggtggaagagacgttcgtgccgcttcttgcccggctcctccgcgcctcgggggctgccaggatccccagtctcggagcctctggcaccggcggcgccggccgcggccgcagacggagaaggcggcggcggaggcaccgactcgagcttaaccagggtcagcgagatgaggtaggtcgttgtccggcgctgaagcgcgcccgcgccccggctcatggggcccggagacccccgagctggggaggggaggggactcccccggactgcctcaggggggcccggccatggggccgccctgctcgctgcccccagcccccggaccccgctgagcccccggcccggctccgctgtcgccgccgcctccgccgcctccgcttgcgcccccctcccatcacatggggcgccccctccccatgctccccgccctgcgcccccaccctcttggagccccgggaccttggtgctgctccagggaggcgcgccggaccgtccaccccggcctgggtgggggcgctgagatgggtgggggagggcggggaggacagtagtgggggcaaatgggggagagagaggaaaagggagcagaaaaggggaccggaggctaggggaaacgaacctgtgcgggggaggcaggggcggggaattgggactcaagggacaggggccgcggatgcggtcggaaagagggtctagaggagggtgggaagctagtggggctggccgtgcgggggattcgcaggggcgcggggaggatgctggggatggagatacaggaggcggcgggggaggaaagagggaacgggaggtgggtgggaacccacgggtctggggtctgggaggggaggggcgtgagatccgggcgaagagtccgggggcctcgcctgggctcggcttggtccggatgcgcgctgtgtccgggcgctcccctcacattgaggaggaggcggcccccaggcccccccaccctatctcccccccaccttttctccaccagcaccgatgtctgcgagggcggtgcaaaatccagggctggatttctctcccaaatcctgggctggatttcctgggacttggactcacctcctccaacaacctagccccctcctctcgcgcaccaaggttaggaagcgcgattgtgaggtatggcatttagggataagggtgaaaatcgatctattgggtggacaggggccgcggtaaacagagcaaacccagggtcactgccaattctggggaagatgaagtgggaaagtgggggccctgaaatcccttcccccaggatctcttgtctcccccaggtacctggacggttcccgttctcatgacccagctccctttcccactcacaccaccacatttaatactttgacggggccaagacttgagctcgactgtcccaaagtgaacttggaaaatgttccccagggatggggacaaacatggaacttagcagggtaggagagaagggagagatctgagtgctggaggagcccaggccacagggtaagtcaaaggctccagctctaggaggagggagaaggatgtgtcttagactgatacccccccatgccaaaatgcatccagtctccatagcaaccgtagctccaagagtgcctcagaaacagcgggcagaagcagagaggaatccgtgtgtatggtgggtaggggaccaaccgcgggatgctgaattagtggaggcactgccctgacacctggctacccacaggtggaggatttcactccccaagtataaggacccttcagttgaggcagtgagagccggcctcttcagggttccctttcagtctcctgaggtttgctgagtgggattctttcagaagattaaagaggaggcaggcagagtgaatggaaaccgtctgctccgtgtcccccacccctctaggggtcttggagttcaaggctctctatcctccagccaggtgagaatcctgaagtggttaggccaaagtggaaaagaggttgagaccccttgggggtggggtaagatgggcgaaggaaggtctctctgcagccttggagaccccttcccgggacttggggagtcacagcagtcccctgatttggcgtcccaccctcctgacgcagctgagactataataagtgctgccgtgggcggctcttggaggcaggagcccgcagcgtgcttggcctggtggggggctgagggtgggggggctgagccaggatgccaggagccctttgttctcccagaggcctgtatccaatccctccaatgttctgtcctggggctcagcagtttctccctccctccctacagaaccaagatgacaccatccccaggacaggagacccttcagtagtgttttttgatggagagggtgaaggagaattgttggctctggcttaaacttccctcctttgatggcctcggttttcctttatgttcaatgggaacagaatactaattcttagagaaggagtaaaacaaatcacttatgaggagtgaagccttctcagggatttccacctccacccctcctcaccctcctccctctccagagctaagcacagcttttctgcctggcctaaaccgctcttctcctttattattattatcattattatttttgagaggggtggggcttagagtttctccctaggaggccccatggcccactcccccttggtctgcctttccaaacactaaggctgtcaggggaagcttcaggtgtagttcctggcaaagggtatgggacaggaggtgagaggggcactagcctccgaagaacaatgggaaggggatcatcagactgtcccactaggcatccaaagcaagctgttccttccccaagttatactctggtgtactagcagagaggtctggcaggaggtgtccttgagggaaagaatgatctcttgacaaccacccaggtaggcaggtaacaatggagaagactgaaatggctggaagagatcaggatatgatggaagaagtgtttccaccagacacctttcatgagcaaagaaggctgcttttgttagctctttgctgcatcagaggtgaatggaatgacagcgagctggaacaacctccagttccaccagttcctcagtggtagggccttgtggatggagagaagctgttcctgccagggctccaccacaggactgaagcctggggtgggcaggaggatgtggcggatggtgttgccatggcagcatttcctccctgtgttgtcatcacttgctctaatggcactaaggaggtagagcggaaggtgtgtggggggaagacaggaacaggagcaaggggaggagaggggaccaagaagagttctggggacctatctgcactttggctctgcagagcatagtgtgtgagagttagtatgcgcttgggagcctgagattctctgcatggtgtacttcaatgtgcatgcgtgtgtgtgtgtgtgtatgtgtgtgcatgtgtttctctctacagctggagaacaagaggtcactgatcctttgtgggtcctgggaatgaactcattatccagtcccagaacctgctgccccagactgcttcctgctctggactccccaggcagggaacaagtctaccatgagtctgtcacagcctatcttccccatgctcacacatttcttcattgccaagaaggtcagctcaacagggacctgtattttgatctcctgggagaaggatcagagcagggaaagagaaagaatgatacctcccatgtctttttccatcctccctaaatgtattctttcccagagtcccatcttggggactaggaagtagctgactgggaattgatatatgatacagctaaaccttctatgcacctgctagtccctgatacacccaagttgagggctgacctttctcttacctcgaatgctgtccaatgaggcctggatgctgtcctggagttcggggtcgtccaccctctctgccagcttcctgaggcggtttagagcctgcttggccacctcatgtcgtctgacttctgctctcactgcagctacaacgaactgcctctgggcatgcatgttgcccagacctgtcttgccaggctaacaaccacctctggccctgaggcccatggccctacagcccccaaacctcagaaggccccttctgctgtgcccagaactccccgcccctgcccgcccttccgtctgtcgacctcacttcctgactggtgagtttcaaacccacagcctgggacagcactacctcctgcacctcccaccccctctagtgttggcccatcaaccctgccagccagtccctgctatgatttcccagccaggtggatggagaaatcttaacagtgtcccagggcctcctgtgggaggtggctaattaagatgggtgttggttctgggagaatatggcaagctaggtccgaggtgcaatcctaaactcttgatgacctgcggatttcaaactctcacaggaattcatgcacatttggtctgttaccctcacagccctgcattctagtatacacttgtacccattgccctctctacacatcccaatgagccctgtatccttatgtcttacgatgtaaccctttttcaggcagctacccactgaggccacctcctgtttaaaagggccaagtgaggccaggcgtggtggctcatgcctgtaatcccagcaccttgggaggctgaggcaggagaatcacttgaacccaggaggtggaggttgcagtgagccaagatcacgccactgcactccagcctgggtgactaagcgaaactccacgtcaaaaataaataaaataaataaataggccaagtgattatggggaaaatcagttatgaaggaggaaagtaacctataaaaagacaaaaactaccatgttccatgtccaatcgctttcataataattaacatgactataacacttaatagtttacaacatactttcatatatatattatcctcatgacagccctgaggagtaggattatttatccctatttgcataaaaggaaactaaggctcagagaagccattaagaggtgaaacaaagacatggatttaggtcttctgattttatttttacatttttatttttattttttaccaagcacataaagcccagattggttataattttgatacccttttcactacaccacacaaccaaaatgcttgtcaaccagttccccttctaatatcattgtcttgcccttgatttaggacctcaaagaaaagaaggtagatgaggaactgaaggagacaatgaagatgggacttggggtaggaaggggatggaggtggggagtgagggggtgggaggtaggaggtagcgggtagtttgacctaattactttgtttccaccggacgcctgtaatcgtagcactttgggaggccgaggcgggcagatcacctaaggtcaggagttcgccaccagcctggccaacatggcaaaaccccatctctactaaaaatacaaaaaaattagctgggtgtggtggcgggcacctgtaatccagctactcgggaggctgagccaggcaggagaattgtttgaacccgggaggtgaaggttgcagtgaactgagatcgcgccactacactccagcctgggcgacagagggagactctgtctcaaaataat

SEQ ID NO: 19 - DNA, 107382 bp, Homo sapiens
  source 1..107382: mol_type = genomic DNA
ctccctgctgggtgccaccagagctgggtcctcagaccccagggagcccagggctgcaggccatcgcttagacacagatgccctggccatccctgaagtaccgcacgcaggaggtggcagcaggcccacaaatctgcatgttaaacaagaaccgccatcccccagacagcctgacgcaggtggaagaaacacacctttgagacacatggttccagatgattgtaaaaatggctggaaactaatctaatttcagatttgaaaagttattagtcacaagattccctccttagcttgaatgcatccattaatttaagctacgagcatgtctgtatccttctgaaaacaggagaaagtgccacttgccactaaaacaaaaggaactgccatttcttagagtgggagcttctgtcatttaaaaagattaaaaaaaaatacagccagaagagactaatgccattaataagacactcacacacagggacacacgcatgcacacacacacacaccactctgagtacacatcttcacaaataatagtcatccctttgtcattgccgccaatatccaggcgaggtatcgggagacccccgacctgcggcttgctgcccctcctgctgcctccaaagcagctgagcacaaaggtgggggggggggtgccgctgagcaggaggcagctcctttggcaccccaccccaccacagtgccgaggtaagtgtcgcgcagggccggggagggaacagcagcaggaagaggggacctacggagcgcacagcagcactaggggaggctcgcctccttcctgacgcctctacacggaacatggatttgagtcttactaaaactgtgtacagagacaaaaagcccactcagcacaaacagagttgtctgttgttagccttcaaaatcgtccgtggtgtcactcttagtgcaacagtttctagattggcaaacccaagtctggggccccaaatgcaaaccccagaagaacggcccatgccctctgctggccctgctatccttgggcctcccagggccaggcaagctccttcgctgtgaccgacggcctcacgcccagcagagccaccaccaacagctttctacgaatctcagtgcatagatctatggaagtcatctgacaaaagagcacacggagaggagtgagtccccacacatcaatgtttcccagcaatgcaagaataaataatttccacttgtgcttcatcagctgagtgagtgacacacggggatgaggcggcagggagggtggcgagcggcgcggagggcacatccgtccctcccatgggtacacgctgcacagtctccacgggggaagcgggttgctgtcacattaagtcaattgcatattcctgtccttaagcactaagaactgagaggcggtcccatctccaggctccaaaacactcttgatatgccaaacagatcacagaagcaccccatagtcaataaaatgaaaaaacagcatctatctatcacattaatactgcaaaccagatatatatattcttctcttacattaaagacataacagtgaaaaaggattgtactgtatttatcaccacagacccgtattctttaaaaactttggaaaataaatgtcacagtcctataggacaaatctgatgattagactgtcagtatattgtcttttttctttttttaaatacattttttattaaaatggcacttgtctgccaacctctctggacctggaaatgctgtaaacacacggggcccaccttctgccactgctccttagttcaggccgggtgaagggcggtgctggcagaacacggcacctgcggacgcctctgcatggccaccggccctcagtcgaggaacttgggtgagccacgccaggggcacacgagcatcgcctggaaatcaactttagtgacaacatcagaatgttcaaggctttaaaaccacacttgtgttttgtgttgctttcactctcagaagattcacagctagtttgagcccatcaatttcatagagaatcatgtattaaaaacaagtaaattgaatgaccaaataaattaaaaatgttttaaagccctgagttcatagactggttttaggagatttttaggacacacgggactctgttttaataagcagcttatagattttagcaaaccatatttcctatgacattgggttctcatacaggtctgcagttcaaaatccaagtttgaaatctgggacggaaggcattctggaaaacggagaatctaataaaatcaatgacgtctcatgttcgatgctggctgtcacggaagggctggccatctgttggtctgagtgtagctggtctcgtgaatcccactcggtacacaatcgctaaacactaaaacatgtcaagcaaagtacatggtgcgcagagtgtcttggtgaacctggaccgccttggccagtgcttggtggtctcgcccgttactctgcccagaggtatggcttccttcagcactgcagggatgagagagagagagaatgagaatgtgcagccttaatgcacgatgaggcagtgcgtcgatcactaagtcgggatggcatggcgggaacctgggagagggaagagtcccacgctgacggccgtgccattaacaggccttctggggtgccggctccagccgctggggccctgccccttccccttccagaaaagcagctgccaatacccgtggcaaaaaccacccctgctgtgacctccagccaggcatgccactcacctgtcatgttccttatccaccaggtggtacctggcccggaaggccaccaggtgagcgtagtatgctggcgctgggatggacacggagcgtgtgcagcgcacgtaggtgtgacacagctggtaggttaggatctgcagctcatcagaggagaaacgattgtcgtcccagaggacgtgatagtgcgaaggcctgcttgtcccctaaagcagatcagaagattagacagttggactcgcataaaatctttaaaaggatactgtggagaagatttatatttgtattattaaaaatgcatcatagtctggacacggaggctcacgcctgtaatcccagcactttgggaggccaaggcgggcagatcacgcggtcaggagttcgagtccagcctggccaacatagtgaaaccccatctctactaaaaatacaaaaaaattagctagacaattgtggcatgcgcctgtagtcccagctacttgggagactgaggcaggagaatcacttgaacccgtgaggtagaggttgcggtgagccgagatcacgccactgcactccagcctgggcaacagagagagactcctctgtctcaaaaaaaaaaaaaaagcatcataactacatatagtaaatggccccatatttgtaaaactgtatacatttatttacacacagaaaaatcatatcaaagatataaagcaggctgggcccggtggctcacacctgtaatcccagcactttgggaggccgaggcgggcagatcacaaggtcaggagatcgagaccatcctggctaacacggtgaaaccctgtctctactaaaaatacaaaaaattagccaggcgtggtggcgggcatctgtagtcccagctacttgggaggctgaggccagagaatggcatgaacctgggaggcagagcttgcagtgagccgagattgtgccactgcactccagcctaggggacagagtgagactccgtctccaaaaaaaaaaaaaaaaaagatataaagcaatattgaaagtggacgtaacaaggacagtgccatttgtgtatcttacattttatataattgatttataatggcaagaaaaagacctctaataaaagttacacattaggccaggtgcagtggatcatgcctgtaatcccagcattttgggaggccgaggcgggcagaacacctgaggtcaggagtttgagaccagcctggccaacatggcaaaacaccatctctactaaaagtacaaaaattagccatgtgtggttgcgtacgcctgtaatcccagctacccaggaggctgaggcatgagaatcgctggaacccgggaggcagaggctgcagtgagctgagtacacgccactgcactccagcctgggcgacagagtgagactccgtctaaaaaaaaaaaacaacaacaaaaaattacacattagcagtaacattgtagaagtgagagtgtgaacgtgagtaccattttacacacctcctgcggttggagatcctttgaaatgaaagcagcaccagctgctgactgcaggcctctctgccacctctgcctgcctgcccgcctcactgcctgctccacctgccagcctcgcaggcccttctgacaacaacctgtccagcacagtccctgccacctgctctgtgtctagccctgtgccgaggcccctggtgctggtgggcagcggaacgttcgtccctgatgctccaccgcacatgctccggcacccctttcctggcgtgtgactggtggctgtcacaggggcccaggggagtgagggcatctgtctccatgggactgctaaggacacagcagcagtggcagccttgggccataaatagctcaccagagaagcatcccccgttagaaagattttgggtagaaagttcagggagaagagtttgcccaggaaacatgcccaggaggccctggtgggtgaggctccccgactagaagggaagactgaacagagggcacacgcaggcagggcatggccccaggcccatctcaccagccctggcaaagcaagccaacactgggacaggcactttgcaccaggaagtgccacaaaccctgcacgcactccatcgcctgcttctcaacaacccttcaaacagcaaaacccactctcagctcccgggctgcaggctggacccggcccacaggccacggttccctagcccccattccttctctgtcaggcatgtgaacaatgtgacattttaaaatatttccaatggaatattaaaggtacgtacaaagttcatagcaaatcctcaaactctagggttcaaatcctttaggaagggatattcaagtccttacttatactttgaaaaaccaaaagcccctctgatcaagctctctgcaggcagggacggcacgtgactaaggttcctcctgtcccccgggcgaggctctgcagagctggggaggggcagctcctaccacggacgtggtgctcctgctcctgtcagtgctcccaagaatcgccttgggtcagatgggggtcccctcatgaaggaacccaggagagcctcaaggtggtaaccaacaccatggccaccttctctgagcacccagtccttggctggagcctggccctggccagtgattgcgcgaggggacggcaaggctgactgcgccaagtgctcgtgaatcgacgccaagtctgccccatgcggcccctgcagcagctgcccagtggccttccagcttccaccccatggcagccccagcgcctcaatcctgctcagacctcaccaagctccagccacaccacacccctggctccccaaggcccttggtgctccctgctcctcagccctaccaaatgggacttcctttttctgggaggctcatgctgacccaccccccaggcccctctccccaccccagcgcctggcacagcctgggctccccggttccctggtactgcctgtgtgggcccctcacaccacatcccacgtgccagccagagtgcaagtgtttgctgaatgtggggatgacacggcagacggccaagactctgtccgaaggggactcccggccttacctggatgccagcgtgactacacaggtagaagtcgaactcggtggggtgggtgattttcgtgtccacagtcgtgcctgctggaatgtttccacttttcccaaccttcggcaacacaggcatctcgttagacacggccagggaccggcagagccaagcaggcgggccaggcagccgcgccgcccgctggccagggtgccctattttgaagtttttaaattggctaatacaggtcctcggtaggatagtgttacataaaatttaacaactgctgaccaccaggttaaatgaattaatgttccatgtgggctggggttattttccgccaactctcatgaaggcccatgagttaaatgcagtcttttcactgcagaacgtgcctctgatgccttaagagtccctcgatactgttggtgctattttgatttgaggtcaagatggaaactgtcaccaacgtacacatctaaagctaaaccaggtgactggctgcggacaagccatcatccaagcacaagcacaccggcgctccaggcagaggcgctgggaggctctgaacgctgtcaggagtgcctgtgctttgccggtagcttgcgcccagcacctgagagagcagggcggctccatcagagactgtcccagaggccaggggcggtacatataaccattcaatggtttaattacaaggtcacaagcatggaccaaaaagtcagccaagatgcaggcatggccacgccagcagcaaacccccaccccacaagccctgctccagcatttagcaaggtccctgatgaatgttttctagttgtacacattttaaatatacatacaaaaaagaatctccagtgtgttcccttctttgcaattttttttttttttttttgagatggagtcttgctttgccacccaggctggagcacaatggcgcagtctcggctcactgcaacctctgcctcccaggttcaagcgattctcctgcctcggcctcccgagtggctgggactacaggcatgtgccaccacggccggctaatttttgtatttttagtagagacggggtttcactatgttggtcaggctggtcttgaactcctgacctcatgatctgcctgcctcggcctcccaaagtgctgggattacaggcatgagccagcgcatccggccctaatatctcttttcaaagtaggtttggattttgttcatctgctttatttcttcttcagtttctacctcaattattttccattctaggatggagaagtggcgtgtaggtgtcaccaggagcaagctgacttccgagccctcctgcctcctggcaacagagatctgggggctgcagcggggaggaagggggacaggggaagacacccaaggccatgagtgcctcagccttcccttgactcctggggactgaggtctcttattcccatccttcctatgtctttaggcttcttttatggccctctttcttgttgtacaacaaattcatctgaatctacagacggcactgtttcagctgcattgcataaggcttgacaggacattctcgattgtgttagcttctgagtactttgtgatttctattcttgttacatgtttaatgcatgagctactcagcagtgaattgaaagttgaaaacattcttccacttcgtttctactgttgatttaaaatttaattgtataatgatttaaaaaatatggcttgagactgaagtttggaaagctcccgagacttcctttgtcctggtagaacttttataacccttccgtgtgaactcagctatttgtagggaagattctatctagctattagacctggcttggcttgttcatttcactcttccaattttcagggtttcttttctttttttttttttaagacaggtcggagtgcagtggtgcaatcacagctcattgcagcctcagcctcctgagctcaagtaagtctcctgcctcagcctcctgagtagctgggaccataggcgtatgctaccatacacaactaatttttaaatttcttttcgagatggggtttcactttgttgctcaggctagtcttgaactcttggactaatacgatccacctaccttggcctcccaaagtggtgggattacaggcgtgagtcactacgcctggccccaattttttttccttagtttttcatttttgtctggaaacagtataataagagctgtgtaaaaatatccacctttgatggcgtgttcatcaatttctccttaaaatgctgttagtttttgctttactttttttttctttacataatttggtgttaggtacattcaagctcattagttgctgtatctttttggtgaatcattctacttatttatttttgggtattgtttttcttttttgagatagtctcactctgccccccaggcgggagtgcagtagcaaaatgttggctcactgcaacctctgcctcccaggtttaagcaattctcttgcctcagcctcccgagtacctgggactacaggcgcccgccaccacgcctgggtaattttatgtatttttagtagagatggggtttcgccatgttggccaggctggtctcggtctcctgacctcaggtgacccacctgcctcggcctcccaaagtgccaggattacaggcgtgagccaccgtgcctggcctggtgaatgattccttttactgtgataaaatatcctttttcctcactgtgatgcttaacttctgtttcaccttccatttgcacagtaaaccttccctgtgtccttgcacagccgtgcctgtagggagtctaacactctgaagtattctttcctgggtgccaagtagatgataaccctctgccttccggtcctcccttgaccaggtcaaggtctcctggttcagtccaaggcctcctttctgggcaggtctctttccttaggcagctaccttgatgttatgcaggtaggacaacgtggacaggtgtgagtttctttttacttatcctactaggaatacggaaaacacttttaacctgggtctcctgcctttcgtcagctgtggagaattctcagctcttctatctacaactcctgctcctcctcattccccttccggaacacctatgagatgtaccatggcgcttcaacgccgccacctctcctcccctcctcagcaccaccttccagccctgccacagggacctgccgggagggtccgagtttgcaccactctgccaattcttacgactgcacagctccatgctgtggtttctaactgggactttttcagagccacctcttttggtaatctattagataagtgacatcttgtgcctagacctagcctaggcctgtgggatttataaattaagactttttggtggggcgcagtggttcacacctgtaatgccagcactttggcaggccaaggcaagaggatggcttaagcccaggagtttaagaccagcttggacaaaatagtgagaccctgtctctacaaaaaataaaaaaaaaattaaccaggtgtggtggtgcatgccttagtcctagctaccagggaggctgacgtgggaagatcacttgagcccaggagatagaggctgcagtaagctatgatcgcaccactgcactctagcctgggtgacagagccagaccccatcttaaaaccctccaaaacaacaacaaaaaagcttcaccaaatcaaggacagccttctctagtgtctaaacctgggtccccatgaagccccttagaggacagagtcaccctagagcctgggacagcggcactgtggccagcaggttctcttgtgagtgtgctcggggtgtggggctgaggggagaaccgtgccccctgcctggagtcatgcagaaactcacccgctcgttcttgtcagtgcagaagagccgggtgtggtgcctcttctgcaccacgatgaaggtgatcccgggctggtagtctttttctagcttgatacaggcctcacggatggccagcaactcgtggtggagaacctaggggtacgggagggaggaggttgtgcttaaagatggtagtgcatgtgagcaacggtcccacgtgcgggttctgggttgagaacacccagccgtggtgattctgagagacaatgagtgtgttcacggggaggtgaaaacacgggggcagaaaccatcctctctgcagggaggactggatgcaggaagcgggggcttggcactcaggaatgggaagaacacttcccctggagggcccaggaggttgtgtgtgtgcaaggggcgcagccaacgccagggatgcaggctgggctctgcgctgagaaggcacatgcagaggccaagctcctgcagaagctcagggcaggctttgggctgggcgcagtggctcatgcctgtaatcccaggactttgggaggccgagttgggcggatcacaagatcaagagatcgagatcatcctggccaacatggtgaaaccccatttctactaaaaatacaaaaattaactgggcgtggtggtgggcacctgtcgtaatcccagctactccggaggcagaggcaggagaactgcttgaacccgggaggtggaggttgcagtgagccgagatcctgccactgcactccagactggagacagcgagagtctttctcaaaaaaaacaaacaaaaaaacaaaacaaaaaacacacaaaaaacaaagcagctcaggcaggctccagccagaagtgctggccggtcaaggtgtatccattctgtcctcccaggaggccatgggtctcgggaacgagctctgcttccgctctggactgggaaggcaaatgggggaggctgggctgcgtgccatcccgcctcctgatcaaggccggggagttcctaagctcctggggcagccacggaggatgtcttcccaccccactgggtggggctcctcccccaacatgcctggggccgctttcttctgcttttcttgctaacacctcccaaggaagcgaccgtgtggcatggcgaggggtggggaggaatcggctctagccaacgggagaaacattcagggcacccatcgcccgggttccaggccaagatggactcattcctgcccacaggtcaccttgatctgggggtgctgcgtgtgctctcaaccaaagacagcaacgaaactcccctcacccctctgtgatggcttccctgcctgtccagactcagcagtgacccattgtggccgtccctctctctacatccagacagtggccgcgtcctggcgaccctaccttcaacagagctgccacctatccatccttctggccctgcctccacacctctcacactgcagacaggcgtccccagacgcaatgagctccccgcctcgcagggacacccgacagctctccacagcctgcaaggcaaagccaggccctcgggaagcccccagatggagctctgctctgcaagtcagcggaactcaagcgtctctcccccatctcttggtccccaggcccatacccgcccctcctcccctccctctgtcctgcctcagtgtcatgtgttagggtctcgacagccccgtgtcccatctcctcccctggacccccttccatggtgtgaccagatcagccttggggccgaatgagagccacatcattcttgccattcatcgagcgtggttctgctgcacaaacaggtgaattacagaccccagagaaggggagggaaggttccaagaggcgcccacctgctggaactggccttcagagacaccgtcgcggtagaagatgatgcgggtgggcttgaagcgcgtggacttgtagaactggatgaggagctcgcggaccatggcggccaggtcttgtatgatctcctgccggtgctgctgcacgcgcacggtggcgcagtagcgattggggtgggcgtccatgctgcccaccacctgcaggaacaggcagtgagtgtggtcaggggttcccaaaactttcctttcctgggcatgtgcctggactctcgggaagatggggacgagaagtgtccccaccctggaactcatgtcactgtcaagtgacaatggctggctgggtgtgaactcagcctttaggcttttggtgtctggcaatagtgttcgtaaatacgtactgaagtacaaaagtttgccaagttacatagtttaaacaaaacaaaacaaaacaaaacaaaacaggccgggtgcagtggctcacacctgtaatcccagcactttggaggccgagatgggcggatcacctgaggtcaggagtttgagaccagcctggccaacatggtaaaaccctgtctctactaaaaatataaaaatgagctgggcatggtggtgcgtgcctgtaatcctagctactcgggaggctgaggcaggaaaactgcttgaacccaggaggcggaggttacagtgagccgagatcacaccacgcactccagcctgggcaacagagtgagactctatctcaaaaacaaaaacaaaaacaaaaacagaaaaacagattagaactatcctctgcttgggatcagatgtggctgaattaatcagtccaaagaaggcaatgggtgggggtgtccctatttcttccaaagaaactacaagcacatcaacagcatccccgaaggcacaccagccatgcaagcagccaccggaaggtgccagccatgaagagggcagacagagagagcctagcacggctctgcggttctctgtcgggggccaagggagcgtgagggatgaggtggcccagcccatggagggaaccgggtagatccccacgtgtcgctccaccctctggctgcggaaggaaaggtccttaaattttgaaaaaacactgatggaaataaaacctctcatgtcactgaaaaataggaactgcttcttggcaatctgcctccttcttcgtaaatccttacagaacaagttctttcccagttaattctcccactattccacgtcctttgtcctgccttgggctataatttttctcttaaaccaagagaaaaataaataaactctgtaatgtttccagttggtataaacagaaatacattaacataaacagaaatctgttcctattgattgagaattgtggggataggggataaacacacagatttctctgttcctgaaaacttgaaaaaaaaaaaaaaaaccagcctaaggctccaaaagcccaagatatagttgaatgcttcataacatttgtacagaaaaaaacaaagctaacggggaccaggtgaggtggggacaggggagggcgccagcccgctgtgctgcgggctttccccagctgcaggaccctcggggggtcccctctgtgccctggctccctcctgggcacactggtgcccagctgtggctcggtgacagccatgcggtgcttccccatcagaggaaagggctgaaaatggctcagcatggccaggtgcagtggctcacgcctgtcatcccagcactttgggaggttgaagcaggtggatcacctgaggtcaggagttcaagaccagcctggccaacacggtgaaaccccatctctataaaatacaaaatttagccagccatgatgacaggtgcctgtaatcccagctactcgggaggctgaggtgggagaattgcttgaacctgggaggcaaaggttgcagtgagctgagatcgcaccactgcaatccagcccgggtgacagttactctgtctcacaaaacaaaacaaaacaaaacaaaaaacaaaaatagaaacaacaaaaaaaaacccacaaaacaacaacaacaacaaaaaaacgactcagcaaagtgagcagcggtatatgcgtgggagtggtggggttgtgattatcgggccaagtggcaagaattagttgatgcatgtgaatttccttaaaggaagtgtgccctgaataacaccagagcacatatcatgttgcttttcttccacctggggcagctcgaatggcttccttgcgtcccagatagattctcttgctccatattctctcccaactaatgaaataataatggtagcattttctttttcttttttgagagaaaatctcactttgttggccaggctggagtgcagcggcgcaatctcttctcactgcagcctcgacctcctgtgctctggcaatcctctcacctcagcctcctaggtagcaggaactacaggcgcacgccaccacccccagctatttttgtagagatgggcgttcgccatgttgcccaggctggaatgtaagcattttctgagcatctactatgtgccaggcaccgtgccaggggcttaacgacatcatttcctaattctcccatgaggtcaacatttgtttcctcattttacacccaagaaagttctgaaacattaagctcattgtgcaagagaaacaagaaaacagaagcagcacgggcctgtctggggttcggggctgtgtccaaggccggagttctcatgctgtgggggcacaggcgtcatcacaccctaggctaccacccgccagtcaggccatgtgcaagggggcctccttgcccttcagacctcccaaagggctggataggcatgagcccctatgccccacctctgactgcttcttagaacttattttgtgtcattctagtgtcccctccagacacctctctcccacaagaccccggccgtccctaccgcagcttagtgagaccccatgcctttcaggaaggacccctggccacgctgtgacagtgggacttcgacagcgtcctgcatgttgtcaatggaagacccatggggaagcgctgacactcacggcggcaatggagggcttcttcccatccccggcgggggggtgagtgacgtctgctcccagaaagatgacgggctgctggaacaccggcggcctgcggagaggagtggcgtcaggggccacggtgagacacgcctggacctctgacgctagtaggtgccaccatcaccttttggaggtggtcagtgtatcatggtaatgcttttgaaaagaatccttatcttttaaccggaatactaaaaaccctgcagattaaatgacacaaggtctgaaatctgcttcagaatagccacgggttggggggcttgggtggagtgtactccagaccagatgggccaggagctgacagctgttgaggctggggctcaggcccaggcccaggagggctcacccttctaccctctactccctctgcagccacacccacgccagggtttctcaccgccacccttagcaccaccaatgcctggggccagctcgctctttgttggggtagggggctgtccccagcatgggcagacgctgagaggcctccactcactggatgccagtagcactccatcaagcctgacaccccaacatgtctccagacatgaccacgcgtcccctggcagcaaaaccaccccatggagaactttcagaccctgagtatatcccagtggggacttccctgggaggcagcacgcacaggggcaaggacaggcatgtgggcctcgggctctccggggaaaggcggaggtggtgacagcaccttcctcccgggttgagagtgcaccgccgcacaccccacccagccttgctcggctgctgcaggcaacatcaggaagcatcagaagtggccgttctgccagccctgcctgttggaaaccaggtacatgaggccctcgcctctgctgccctctccccgcatccatttccctgcatgcctgtgactcactctccgcccacatcctctcactcccatcgcctgccttgcggcagagctccgactcagccgaacccatcactgcttgcgctggctcccaggccccttctagtcagacttctcacggccacagcaacagggctcctctccccaaggtcaccgatgagctctgcatcacccagacccatggccgagcctcaggcctcgctgcgtctggcccgctgcaggacacacttcccttggtgcctagggccctgcggccggcctccctgccccagcctctcccatctccgctgctggttcctccctctccaggccttgaactccagccttctctagggcccagggcttggaataccacctgtctgctaaggattcctggatcctgtctcccctgatgccagcctcctggctcccaccgtccactcatcagctgcactcaaatgacctgcagacgctgtgggggccagttcatccacgcccagtgctcaccctcccaacagcctccccgtctaatgatgacggggtctctcctgcagcccaggccaagggccttgatttttccttcacacacagcccaatcccacctgccagcaagtcccagggctctatcttcaaaacatctcaaagtctagatgctcccactctgtgcccctgccctggcgtggccgaggccaccagcccctctcggcttcacggagccagaggtggccacactgtcgggtgcctccgacggccccagctcaccccagctcaccagagggagccttcattccccagcattccccaggcagcacgtgggagggcctgtctcttgtctgctctcatggtcctctcatggctctgctgtgcacctgccgcctgtacgatgggctcatgacctgggtgcctccaccaggacttccggcccggtgctgcccacttatggcccaaactccctgcacacagtaggtactcaataaatacagaacctgttgactgaggaacagcactttcagttcccagccagctctggattggtcttcgctcattcccatgaacctgtttcactgcagagcccgcaccccacgctcacagccgttccactcggaatccaggttcttcccatgttattatcccgctccctgatgaattcaacggactgtttctgggtgcgtgtaactcggtagctctcaaaacctggtcccccatgtggcagcatcggcactgtgtccgtccacttgctaggggtggaaattcctggccccaatcagtcctgctgagtaggacactcgggaacgagccccgctggggttcaagagctgctcaggtgtgaggacactgtggtggccaagcacaggcctgtgcacacagcaggggctcaccaccgcccactttccaaatacagagggtcactgccttaaggcagttcgatttaggattcttaactctgtgacggcgtgccagtgatgcagatttagcgcactgcctggcttaggatggctttatcagctgagccccactgtgactgggagctccaacagatccacgccacaggggctgcctatggcctccagttccctcctgcccaaacgcacaaataatctgattctacgtattctccgttgttgtcgtccaaatgttaagacaactgccagggttggcaaagatgcctgtcattgtgtggagacgtctttcttgcctacatcacaggttggtggctttggaggaggggaagaagcaaaccctggccctgccctggaatacctggatgctcagccagtcaggaggtgccagaggagggtgcagctccatcacccccaacccccgtccccggcggtcagccctgggcctctgagaccggcaggtggccagcgcttggccacatatcctgtcctggcctgggagctgccaacagtgtgctcccatgaggagcttttcagtctaaagtcccagcacgacgcagcatccatgactagcctggtgtgggaagcatggtagagggccctggtccacacggtagctgctgctgctgctgagccagggaagcccatctccatctcctggccatccaaggcatgccctgctctgccttgcccactgggattcgaggcacaaatttctctgtctggaaacccggccacagtgctcaaactcctgcagacgcccctggtccccagcagagcgtgagcagccagatctatgtctgacatctttgctctgctgtggccaggacggtgctgggcccaggtgaagggaccctgcccccctgccccctgcatactgcaccccaccctgccaagcgtcccactgtgccctggtccgcaggcggaggtaaaggggccgggcctcacctgccctggggcagcaggatgttgttcacgcctcccagcttgacgttgatcttcaggcagaggttggacagggtctgtggcgtggtcctctgcacgttcttcatctgcacgcactgcgtggccatccccagcaccgtgtctcccacgcgcttgacctcggctaagggacatgagaggcacacacagctctgccggcgccccttcctcagctggccccgagagcagcagctgccaccagccctcttgcccccatctggcaagtgcagccatggcagctgtgctgagctttgcgtgtccccctctgtccgaggtcggtgatagaagagggtccctggtcccgagggggacgccaagctccttggagtccagactccagcacggctgtgcccgcctcgcccaggccaggctttccctccctcaggaagggaagttgagtgagtctatctcatccctccaatttatcaacaaaacgatttaaatgcctcacctagggccccagggcaggagagaaagagcccaactaaaagaaaggacttggctccctgcttaggaaggccacttacactggccgggcgcggtggctcacacctgtaatcccaggactctgggaggccatggcgggcggatcagctgaggtcaggagttcaagaccagcctggccaacatggcaaaaccctgtctctactaataatataaaaattagccgggcatggcagtgtgtgcctgtaatcccagctactcgggaggctgaggcaggagaattgcttgaactcaggaggcagagattgcagtgagccaaaatcacaccactgcactccaggctaggagacagagccagcccttgtctaaaaaaaaaaaaaaaaaaaggaaaagaaaaaaaggagggtcactcacaccacggcgccctggctgtaagcaaatgcttgggtggttaaaaataaaaacactggcaccctccaaatccttggcagatgtagacctgacatcaaagagctccacggacccaccccccgctattcctggtctctttcatgaagcaactggtcagctgctccctgggcaggtgtggggaaatggtgaccctgggacagtgttagcaggatgtcaacaccaacagctttttcttcccttctttttttgggatgttgaactgagagaagtgtggtttttacatgtcaataatctgtctgtggctcagcgtggggccctgtgggtgaccccctggcatggactttggcgaaactccacaaaattctgaggtgggcacagagtggttacacataggctgagtcccgggcaggaggtgaccctggtgcaacgctctgtgcgttaaacaaacgttcccccatccagccaacacgcatgctgtatgatgggcggggtgcccacccatgtgccaaggcctgtgccacccgagggtgctgactgcccaggaccatggcatcatacaggacgacggggaggccctgaacacagtgatcagaagtggcagtgatgacaagccacctcttcttcctcagcctcctgaaaggcccaaaaggagcacctttctcagtgcagcagaaacacagaggggcttaggcaggaacaaacacccacggagaccacgacggctccccacagccagcgggagcgcccacacctaccgtacacgggcgtcttgccgggcaggatgaccaccaccagctgcaggcccgcatacgtgttcttcaggtgccggaacatgggctccacgctgtccgccccctgcgcgtatttgcagaagcacggctggccctggatgggcatgccggcgtctctcgagatctttctgagctgctctgtgaaggacctgcaggagaaggctccgttcactaccgggcactgggaatggcagagaactcaggccgaccagaggctctaacacaagggcgtcatttttacaaagcccaaagcactttcattgaggtcaaaattgttcttaaagtcctgaatgaggccagaattcagagctacatctcctaacacatactaactcatgagaaaggttaagtgtgctaaacatacatgtaacatgtaagtgcactcaaaagtcacatgcggctaacttgccaccgtaacacagcagcctttaaaccgcgctcacgctgcctcgcggctgtggcggccccagggcagtgatgcgatgctgtccccgtaaagctgctgagcagcgcctggagctcttgtgaagctctccccacgtgcaggccaggcactgtcagagtgagggaggttttcagctcactgtccttttggatcttttcccccagtagttctgatgggcataacttggactgtatgacatcatcacgagagaaaacagcagcccgcagcctgaggagtggcagcagctggcaacggctagccttgtgaagctggggcggggtgggaggcagggcagcggcttctattttaagccgaagactaagaatcatgtcaccttctacaataagggcgaggacacggcactccaacccagccagtgtccaatttcctgtacattagatcaggtcaagaaacacgtgtgtgtccacccatatcttcagctccaggccaaagtgaaggaaggggccaaggacaaaagaaggggcaggaggcgaccctgtgttcagaactaacctacttcagcttgcttcccaaaccccctctctaggcttccacctcctctgccagcagtgtggacacaaggtggcctcagaaggacagatggccactcgccagcaagacgtcagctctgagggccatgctggttcgcagtcagcccttgctggaactgttaagggaccggctacacctcacaggctggagttctcccctgctgcccccacagagcggggaagcaaagactttatgttccctttgaagtctggcacaaaggcacgagccaccctgctgtgtgctcccaacacagtcccgctgggcccgtacctggcacggctgtgctggccgaggcgagcatcctgggtgagggcaggcccttccacagcacttgggcctcctagagggcctggtactcacctgggcaggtggcagagacctgaaccaacacttctctcctcttaatcactcctcttgtctgggaaggaagataacactcccagcctctccacctctctatttcaccttctcttcctattttttttcttgagatggggtcttgctttttcacccagggtggagtgcaatggtgtgatctaggctcactgcaacctccacctcccgggttcaagcgattctccagcctcagtgccctgagtagctgggactacaggtgcaccaccacgcttggctaatttttctatttttcgtagagatgggctggtctcaaactcctgacctcaagtgatccttctgcctcagcctcccaaagtgctggggattacaggcatgagccactgtgcccgacccatctcttcctgattctgtcttcattttctccttctaatttacacaaatatggagccaaattattattttttaaaataactgtagttcattgaatccaattctctcttttgcccctacttataaatttccttcagatcctgtttggttttgtctacggtctgcgttacttctccatgctcactgcgagggtgggtcccaggagtgagaggggcaccaatggggccagcatgtcttgccctggcccggccaatggtacgtgacagggaaaggctgatgaaccctgacatcaaaacccataccagcaccctcacccccaccccaaccagagtcagccctgcaagtggtcacttgagctgcccatcgggcagcacccccaggccggagcctctgcctgtggggggcttacttcagatggacttccgtgcactggcgctggggggcgaagcacgcaatggcccacaccttgatctcgatgcccgtgtggaactgcttgttccgcatgtcccagacgccctggacaggggtcgcaatagctttattctgcaaatggcaaaaggttcagggtgagaaaaaaatggaaaacatattccttcaaccttagactttgtcactctcactgttggtccccctgaccaacaactgcttctcagggaaagaacttttgtgttgtctcctgtctctgacctgcctagtgatgcagacaactgacaggatcggtagatggatgggctggtggaagatgggtgggtggatggttgatgggtgggtggatggttgatgggtgggtggatggttgatgggtcggtggatagttgatgggtgggtggatggttgatcggtggataaggtaggtgggtggtccgttgatgatcggtggataagatgggtgggtggatggttgatgggtggataaagtgggtgggtggatggctgatgggtgcataaggtgaatgggtaaatggttgatgggtggataaggtgggtgggtggatggctgatgagtggataaggtaggtaggtggatggagagatggagagatggatgaatggatgaatggatggatggatggagttagatggaggatggatgggtaagtaatgaacagacagatgggagctaagccaggaggagggaggcccaaagctccatccaacctcatgagcagcctggaggaagagaagtgccttgccatgctacaggccttgccatgctacaggaaggcctcctgttctatacagagctttccctcatttcccctcctctatcaccaatgatgtgggaaggggagatcagagctgggactgagcccatagctttttccactcagcatgccactgcctgcagctgtgtcggaaacgggagctacttccacttgagaagagaaaggcgggctgtgcaaatgcgctgtcagctctcagccagctctcagccagccctgagcactgtcacctaaggaatctctgaactggcttcaagtgattctcaagggaagggtgggccaggaagggtcccgtgtgggagggacaggcactcctaggcctgggggcattgctaaaggatgcggctgtgcctgggctgccgtcatttactctggagaggtttttgttttttttagcaggaagcatctttcgtacaaaatacaagcctgctgtagaaatcagacacgtgatagaaacaaatgctttgtttcctatatttttataactactgcctgttcccaccagcctccctgtgtgcaagagtctcacagacagcctggggctccagacagggagtgcacacacacacacacacgcatgcactcacatgcacatgaacacacgcacatgcacgcgcgcgcgcgcacacacacacacacacacacacacacacacactcttactatacaggtgcttctcaacctcggcacaactgacatccgaagctcaatgattctttgttacggggctgtcctgtgccctgtaggcgatcccactcacccccaagttgtgacaataaaaaatgtctccagacactgccagatgtcccctggggggcaaaatcatccctggtcgagaactcctgctgtacacattgctttctgagggatattttgtttttttgcactaacaatggaccaggggtaggtagagtaggggacaggaatgtttcctcacattataatgttttagagatctggaaaaatgtattcatgtattaacagaagcattacacgctcagtcaggtgcagtggcttacacctgtaatcccagctgaggtgggaggactgcttgagcccaggagttcaagatgagcctgggtaacatagtgagacctcgtctctacaaaacattaaaaacctagctgggtgtggtggtgtggctgtggtcccagcaattcgagaggctgaggtgggaggaacgcttgagcccggaaggtcagggctgtagtgagctatgaccgcgtcactgcactggagccagggcaacagagaaacactctgcctcaaacaagttacaagttttttgttttttgtttttttttttttttgagacggagtttcgctcttgttgcccaggctggagtgcaatggcacgatcttggctcaccgcaacctctgcctcctgggttcaagcgattctcctgactcagcctcccgagtagctgggattacaggcataggccaccacacccagctaattttgtatttttagtagagacgggatttctccatgttggtcaggctggtctcgaattcctgacctcaggtgatctgcctgcctcagcctcccaaagtgctgggattacaagtgtgagccaccatgcctggccttttttttgagacagtgtctcactctgttgcccaggctggagtaaagtggcacaatctcggctcactgcaacctctgcctcccaggttcaagtggttctcctgcctcagtctcccgagtagctgggattacaggcgcatgccaccatgcccagctaatttttgtattttttagtagagatagggtttcgccatgttgaccggaggctggtctcgaactcctgacctcaggtgatcctcctgccttggcctcccaaagtgctgggattacaggcatgagccgcagcacccagcctacaagctctcttaatccctacactcttgagatttttgcaacgttggcttacacaagctcttctgtttttcagacaaccactgcccttgctaacagctgaagcccgagggaacagaagccagcagggctgtgaagcggtgctgggttcaaaagccccatccccgcacaggggccaggcactcctcttgccctcccggggcgtctcctccccaactcatgaagggggatcacgggctcttcctcctgggcttgggctgtgtttatacagcatctggggcctcgggggacaagcgagccaaggaggggctgaagggccctgctcagactcccttcagagagacaagcagtggccatgcccaccaccagggacacagacccccccacgtgatggggtgccacgcagcagtgctagaggacaagacacacacgaacagcaacacagaacggccagcagcctctcagtgagctctaaggaaatgttagctagaaaacagcgaggcacagaaatataggtaatgctattattttcacaaaaaggggtgaatcatccctgggtgattttacaaaggagaaggaacaccaactgcttcttgagagggcaactgagaactgggaaaaaagatactttttcctttaattcttttgtatcttctgaattctgaaacatttaaaaaacagaactgttttttttaagtattttttattttttgagacaagtcttgctctttcgcccaggcttgagtgcagtggtgtgatctcagctcactgcaacctccacctcccgggttcaagggattctcctgcctcatcctcctgagaagccgggactacaggtgcgcaccaccactccaggctaatttttgtatttttagtagagacagggtttctggtctcaaactcctgacctcaagcgatccacccgtctcagcctcccgaagtgctgggattacagatgtgaaccactcactgcgcccagctcagaacccatattttaaaataagacaagaaaaacaaacaaacaaacaaaaaacaaaccaaaacctcgctacaggtcttgaggatgagaataaaattccattaggtagaaactagggtgtaaaaggttaggcagactcttacacagatgccaggtgcttaagaaagtcagtgacctctgacactaagaccctgcagagccctggtgtcccttccagcatggtcacctctgggccctcccatcagacatggtatgcttgcaaccgtggtatgcaagcgagcccaggaggaaatgagaggagaccctggagggctcagtgttcaggacacctttggttacacactgataaaaaggagaagttaagggctggacacagtggctcacacctgtattcccagctacttgggaggctgaggcgagagatttgtttgagcccgggagttagaggctgcagtgacctatagtcaggtcatgccactgccttctagctcgggtgacagagcaagaccctgcctcaaaacaaacaaaaccagaagttaaattagcaaggacaaaaaactgttaccaaacatccccaaagcaaaagttaaagaatagaaaagcagtacagccttctgggaaataattcgaccctcggtgagtgtctgtcacacacagaatggtgctctctaaactttcatgggataataaaaattatcttctgaaaacattaaggataattctgaaaaactttaaaaaggaccaaggaaagccattcctttatgaaatctcacgtcttttacaggctcagccgggagtagaaaggattctcctgcatggaacacagtctacaccgcgggcgatagctcagaacctgagaggggtcgcagggcagagacatgccccgcagccacacgttccccgccgccccacacgtaccctgcccccgtagaggatggagggcggctgcagcacccgcccagtcacgtctgtcatctcatctttgaccatgattccaaattcacggacgtatggatctgtgttgaaacttgcacttcgcatctggcaaagggaaacaagaaaacgcacggagtgggtggaggcctcccatctctctagcagctgcgtccgttccaagcatcagaggtttctgtgccagggcaaccggactggattccacagggcagccctgcccgggactgacactcaccaatttgctaatctcttcttgccgatcgggcgccgacctagcagtcgctctgatcatggttgaggtctgattgtccgttaattttttaatacatctttgtcctgccacaatgttacagacctgtgaagaggacgtagagacaggccgtcagtgccgcactggagtgaccaggggagcaggcagggggctcaggggctggtggcctggctctgcttgggaccgtctctgcctcatccctgggctatgaagtgctgtgcaggtgtctgctgtgggggctgctccacggccttccgcttcacaacagaaatgcctgttaagtaaaccccacgtcacgcgaacacagagaccccacggcctctgtgcccagcccaccaggtgagcggggctgtgtcctgacaccggcacttctgggctctctccagtcttcggtggctgcgggcgtgaaagcagctgcaggtgcgaaagacgtctacctgtgggacgaggtgctggagctgcccagccctacctgaatgacaggatctaaacaccaagggaagagttacagcacatggctcagggtcggaatttgatcctttcccaaggcaaggatttttcaaagagtcgtgatgttagaggagagtgaatgacgcaacggtgcagtgacggagcacctgcctcgcgctgcggggcctgctggacacgttacacacaacctcaggcaaggttcacaccaatcccacaagagagctgcagaccccattctactgaaggcaaaaccgaggtgtaacaaagcccattaacccacccgcattcctgcagcagcagaggcagtgccatttgtatctgactggggcctcggcggtttctcgaagctgcatgccccagcctgggacgccgccctcccaagcccccagagacacacaggaagagggtgacttgcctccaggggaaggtaggtgtgtttctgctcctgtccgacttgtaaacatgggaggtgggggtagcgcagaaccaacttgtgcctgtccttgaaatactgggccaccgtgcactccaccgtctgcccgctctcctgctgcagcgggaatctgaggagcaaaggggctgttcaggccgagggcatcccggagccccttcccctgcgctgcttttcatttgcgtttgctttttagggtgacgtgtgaggagcaaacattcagagcacttccgggagtgaaaaccatgtcatgtgctttgggttatctggaatgtttctgagcccctaaattctcattttgtttctggagttgggaaacaaaaaatacctacatgcatcattactcataaattatccacaacgtcacagtgtgtgtaaaggagtcaggacgaatgggcacgaccagaaaggcctgcgcgtcttccagcagaccgtggtgaccctggaagccttttacgtgccgcgcgctcccggtgcccagaaggcctgaagcccccaggacaggacgaggaaagcaggccaggccggttccggccgcacggtgacggcaggagacgcctgggtgcagtatgggtgagtgagggggaggcccacaggcacaggaagggttggcctctgtgtggggatgagggcacgggggctgctagtgcagggcaaagggccacgtggctcagtttctactgcacagaccccttcccccaatccagactgccgggccatctgcagcctctgccaggccacaggccctctcgtccttctgctccctcagccacgggcatcttggtacctccagtgcctggcaacaggcctggcactttccatggaatgatccatgaaataaacgaaccctaccggcctgggagacattaactggggcacaggggccaaatctatcacctcctcccgcaaagaaacaccagtacaacccaggacagcggtgcactctcaccccccactccggcctgcgtaccaaaccgtgctcttgccgtaatgatgggacacgcggactggcccagggaagggggcgtgggtcagggccacagacccgccacctccagcactaaggatgggacaatgaacacaaaagacccttctctcctctgtgaggctcaggaaggaagagggagagagagcctgggccggcccttctagcacccagggggaatttcatgatctgagtttattttcttaggtgaagtctggaatctactgagccatgtaagggacaattttgggattgaaaaacagcatgaaatggtcctttctggagaatgggcacagaatcatggctccagagtgtgcccgtcggagtgacagtgggggccccagccaagagagtctgaaaggaagggcgtgttacgtttggtgactggcgggccgccgggtcacattgcagacgcggtacttcctcttcatctgcccacagtgcgttatctccacctttagacctggggacacagaacacaggcatcggcatcggggctgtcccgacctgagtgcaggcgccacttgcgagaatcagttttcataggaatgtggctggggacccaagttatggggggctgcagggctcccctagggagggtgacccacaggtcacccccaggccaccccagccgggtccgtctcacctacaagagtaccacgtggtggaggggaggctcagcttagagcatggggtgtccaccctcgtgctgttctgcgccccccatgggtcatcgtgataacacggggtacggtggatggccctgcaaatggccttccaaaaggacgggttcagcgggcagggcttgtggagccaggggtgggccccccattctgttgctgatgggcagaaggaccccgggtaagtcctagaccccccccaatctgagtttcttggagtagaaagcaggctgactgggtacagacacctgccgggctgtgtaaggattaaatgaagacaaaagaaaacgcatcctaggttccagcgttaggaaatgctgatcacagccacgctgctgcttctagtcctgagatcatgactcagacgtgactgactccccaacctcatcctcaccccatggggttgtatttatttaggaaacccccactcccgctctgggaaatggatctaactcatctccatgctacctcatctgatggctacattctgccacccccacctccccaaatgcgcacaagaaccagaactgcaaaatgcggtcccggaggcggaccgggaaggggcctcccagccctcagccaggtgtgctgggacagttcattacctttaatttctttggtaaactttaccctttgggaatctgtcagaggtttttgttgttcttcaatacttttaaaatccaaaacttcacaaacaaactcgattactggctgtgccttgtaaaacgctgttgctgacactgtaggcgagaaaagaggcaaaggcctaagcatgactgtggggctgctggacgggcccatagtcctggaggggcctcataggccaggccagccatggtggggacacccggccggggttctcactccctactgaggctagcctcaggcccagacacgggcaggccagcagtgacaagcccaggccctagctgctggcctccctctggtcagggtgacagaaaggagctggctgattagttaaagactaaagtcaccctccgagaatgaagccagtgttgtaggattttctggttaccgtctggtgtagatatttctgaaattcaccatttccttttatgtagttctttttcaataaatgtataactgagcaagatcaaattctcattgctttctagagcttttcataataatcagctcccaaatgagaagacagatccttttcgctggccttcactctcgtctttttcacagagagggcagcggatgtcctgcacagagcagcgactaagcctcccaagagagggacaggccacacccaggctacagtcaaacccaggcctacaggaggccagcagcaaggaagccccggatcctcaggcccgcctcagcccctgaccacagcctctgagggtgcgaccatctcgtggcttcacgctggcctgagagccactgccgtaacccacccaacactgcaggtgagaccagccaggtgtcacgcagcggcgctggctctgacagaggccatgcgtggagctggccacatgccaccccccgaccggggtcctgaccccccagcccatgcccaaccctgccctgcagtgaagaccccagggcgctgcttaccatcaatattcagcatcattttccagagagaaggccggacggactgatggaagccaaaccacacttctcggcccccgccaagagggttagagcagccttcggacgcggtgaagaaggagcggcccacgggggtgtacctggaaccaagagaccccaccccgcctcccgtcagatgtgtcttccggaaggaacagctgcctctgggtgggcttcgcctgcgcccaccacaccctcatcagagttccgtttcccctccttttaaatccacgtttaccacacggcactccagcctgtgtgcatggcctgctgtgtgggacactgtgacagcagcaggctgggggacccgtggcctcactgggggatggtgaaagacgtttaaagacaccgcacaggtggatcacaagcccccaggacctggcgtgtttctggtccagactccctgtcctggctttgcctcgccttactgtcctcactgtctactcttcacctcttggggcctgtgtccccaagcgcagatagaattgggcacctgccaagtgccagccccagccaggcccagccccagccgtggggagacgtgttgcttctggccagtggctgtccacgcatgacccagcatctgccggctcctttagccgtgggctccccaggtaggctccgaggccccggagctgcccgctgtgggctcccccgtaggaggtggaagggccagcgtgagggcttcacaacctcttccgggcctgctagggatgctgcgctgacccggctggagctactcgactgaagcagacgcattctccagcacagcagcctcacctgctgcacgggcaccgtggggtctggtggcccgggaggcgccgtcactaatgattctgaagggaaaacacgctgtgagcctcgatgctccctacttgtgggctgcgctgatctaatcacctacacggccctttcactttccacctgagacgtgctaataatcccgcctctactgctcttcttttcccagaatgaaaacagcagtttcctccctgattataaaattaatgtaagtaatccaaaggaattcggaaaagaatcacagtcatttctgcaactctattaacaaggtagatgccattttggcaaccatcctcctagagtgtttctccacgtacctacggccttcctccaccgatagttcaaagcagagacagattacacgtgggggaaggtgtgttcctgccgggagtgacagcctgtcctgtatttggtcacctcctcccatgcctgaagactgagaacaccatggtcccttctaaaaatcttacacatggcctcaaagcaccttctcttctatgagggaagccccaactctctcctggaatcttaaagctttggtcagtcctggggtttgtcactgtggggtttgttttggtttcggctttggttcgaaagagatgaaacttgaaaactcaacttgttcccgggcaccagtgtgagggcaggtgtgctgagggctgacgcgctgagctggccttgctcctgcaacagcgggccactcaggaaattagtgcaaccctctgcccagcaaccgggcagcttgtgagtccttcaactgctcccctacaccctctcccagcaatcgcaagtgtggccatttgtggtaaaagagtaatcctgagaaaaaggacgtccccaacagtcacaaaaagcagcggtgatggtccctagagttgcagacatgcatgcagcacgaaactgggaacacagcattactctcctatcacgagtcccaagggcaagagatgagcagaaaagtgctgggtgcagagggctgcgcggaacacgaaggcaccagcgtgcacacaaatagggaggccaacgttccgggccaggccgaaaatgctggtgacttatgtttatattaacactgtttccaccttagcaccatttgtgttatcttcatcacagaaaacccacgtgaccactcccaccctggatccaagaatgagccgttcctcggacagatttcagaccctgcggggggccctcggagctgcaggggagtcccccgcccttggtcccgtgtggcgccctcacctcatggatggcaagtgcctcatgaccacgtccagggcctggatcgtctcaaaagggacgctgggcagccgccctgaaagtgcatcgtgtaacgcctgcaagctcacgcaggacacccacttgatggacaccttgaagatgcgatccttgccttctcctggcagcgtgacctccagctccacctgcgaggatccaaggcacacaaggttactccctcctgcgaagccccagggaggacgcagcctggcagtggttggcttccagacactcctgggtgaggaagtccccgcccaggcctctagccaaccactagccacatgtggctatggagcacttgaaatatgaccaaggaactgaattttaaactttattcacttacttttgatgaatttaaatgtacagagccacatgtggcagtggctggtgtactcacagtggtcgaaaacgtatcctcgtttcacccccaaacaatgaactcactacctctctcctcccagtctctgaatcgccccgtccctcacctatgggttgcacctaacgccagatcatgctgccgtcacctgcaagccccactccgctactcagaacccacagttgaatcgcgatctggccctcatacctccaaatatgtggacacacacgagcccactcaggtgacgcgtgaagcaactttgctatttgctaatcatgcttcccagtgtctgaggaacaccgatgtgacaggttacagatggtatatatgttatcctcacatgcccagtgaccccagcaagggaaaattcattcgccacttttgttgagacagggtctcactgtggcccaggctggagtgcagtggtgcagtattggctcacttcgaccttgacctcttaggctcaagggatcctttcgccttggccttccaagtagctggaactacaggcacacgccaccaaactcggctaattttttaatttttaatttggtagagatggagcttcaccatgttacctgtgctggttttgaactcctgggctcaagggatcctcccaccttggcctctcaaagtgctaggagtacaagcgtgagccattgtgcctggccgactcaccactttttatccatgaaaccacagaaacccagacttaaaaaaataacccaaggccacaaagccatgaaagggcagagacgggatctggaccccgaaggccttcccactccatgtgtgatgccagggtcccaggtcttcagcaccggcctctcctagcctgcccagggcctgctgcctctgctctgtgcacctgaggtgccctccctgattcaggaccacaaaccccagtgtgccagcatgcccaggtccagtgttgtttggtggcaccaggcacatttgctcgctcgcccactgcccgccatgcccatgcccagctcccatctgctcatccttgtcgcccagggcctggcctcttgccacaccttgtttgaacctcacggagctacgaccagactctgcgggcgtcacctgcacacctgggtcccaggtacacaccctttccacctgggcctgggctggctctggcagacgcccacgagccctcagagcactgttgtgcccgatggccccaaactggccgcgccccgaggaccatctgcaaaagatgagggcagggaaaaaggatcgaatccttccagccggatagacttcaaacatcgaatagcaagaaaagcagcaagccacagaagggcgccgcagcacgattccttccagacatcagagccatacgcacaggggatgcagcacagctgaggaaaccaacagaggaaagggccagcttcactcaactcatcaggacagcggagggggtggcggtggggggacgcaatcaaggcttcgcccatgggggatttcagggtgggaggagggaacagctgggcctgggttgggggtacaggatgtggtttaataccactctttaaataaatgtacatagctggcccttgcacaacatgggttggaactacgcaagcggagttatatatggatttccttcagcctctgttacccctgagatagcaagaccaagctcctcctttctctcctcagcatgaagacagaggggatcctttataataatccacttccacttaatgaaaagtagacatattttctttaccttatgatttcttaaataactttcctccagcttaagcatgtaagaataaactatatagggccaggcacagtggctcatgcctgtaatcccagcactttgggaggctgaggcagatggatcacctaaggtcaggagttcaagaccagcctggccaatgtggcaaaaccccatctctactaaaaatacaaaaactagctgtaacaatatcatacactgtggaataatatgcagccataaaaaggaacaagaccagctgggcgcagtggctcacacctgtaatcccagcactttgggaggccaaggcgggtggatcacgaggtcaggagttcgagaccaccccggcccatagtgaaacctcgtctctactaaaaatacaaaaaaactagctgggtatggtggcacgtgcctataatcccagctacttgggaggctggggcaggagaatcgcttaaacctgggaggcagaggttgcagtgagccgagatcgcaccatactccagcttgggcgacaagagtgaaacgctatctcaaaaaaactcaacaaaacaaaacaaaagccaggcacggtggctcacacctgtaatcccagcactttgggaggctgaggtggggggatcacgagatcaggagatcgagaccatcctggctaacatggtgaaatcctgtctctactaaaaatacaaaaaattagccgggcgtggtggcgggcgcctgtagtcccagctactggggaggctgaggcaggagaatggcatgaacctgggaggcagaggttgcagtgagccgagatcgcgccactgcactccagcctgggcgacagagcaagactctgtctcaaaaaaaaaaaaaaacccaaaaaccaaaaaacaaaaaacaaaaaaatacaaaaattagtcgggtatggtggtgggcgccttaatcccagctacctgggaggctgaggcaggagaatcatttgaacccaggaggtgaaggttgcagtgagccgagacagcaccactgcactccagccctggggatcagagtgagactctgtctcaaaaaaaaaaaaagaagaagaagaagaataaactatataatacatgtaacctataaaatatgtgttaatttacagtttatgttattggtaaggcttctggtcaacaacagactattagtagtagtttacgttttgggggagtcaaaagtcatacatagctaggtgcagtggttcacgcctataatcccagctctttgggtggctgaggtgggaggatggtttgagtccagagttggagaccagcctaggcaatatagggagaccccatctctgtgctcccagttactcaggaggctgagataggaggatcgcttgagcccagggaagtcaaggctatagtgagctgtgattgtgccattgctctccagcctgggtaacagagaaattgtttcaaaaaaaaaaaaaaagttatgaatgaatttttgactgcatggggaatcagcgcctgttatgtttggctatgtccccacccaaatctcacttgaattgtatctcctagaattcccacatgttgtggtaggaatccaggaaggtgactgaatcatgggggctggtctttcccgtgctattcttgtgacagtgatccaattggtttatcagtggtttctgcttttgcttcttcgtcattctctcttgctgccgccatgtaagaagtgccttttgtcctccaccatgactgtgatgcttccctagccacatggaactgtatgtccaattaaactttttcttttgtaaattgcccagtctttatcaacagcatgaaaattggctaatacagcaccattaacctttttgttgttcaaaggccaactgtacatatatttctttttcattagtgctacttcataataaaattctaaataagtcacacacaagtaacagtaactgaaaatgcacatttggcataacactggcaacatggcagacattcctgcactcactggttcccccctttactttcttttttttttttttttggggggggggaaggtgtcccgctctcagttaaagaaacagatctggaggggctgactgaggcgccccgggccaggtggcaggaagcagaggggcgagtgcccctgtcaaactgtctgactccagaaagggagacagagtctctatgggcccaggaccagtggcttggctgggcatggggggacaattccagtacggactggcagctactgggtcccaacaggagtagccggtcgctgagaagggagtgccattccccttgtccagaaacagcacgtccaggtcacggcgtgcaagtggagtgagcttgggagtgggagagcgcgtgcatttccagctcacacacgccccagccaggaggtactttaggcccgagtacatctgcggcaacagcactcggcatccagcctacagtgctgtgccctggcacggatcggatgcctgtcaatgccacctttcaaaaacctctgtagtcaacaccgaggggcaatggcaaggggtctattttcccacagcaaaatacattctaatttgtaaatgtatttcagtccagcctccgcttggcctgcagagaaaggacagcagagtcaccccgggctctgtaactatctgcccatcccacgtccacagtggctggctggtgctcgtgtgtggcagcttagggctgcatggagattttacgacggccatcacgccacgagggcaggaggcacatggctctccaagggacaggcaccgtgtgcgtctgggctgccagcagcaggtggtccacacccgagacactgccgcctctcaacagcccaaagcgctcggtcccaatgacatgacatctgaaggtcactcccagccctgctgcctcccgtgttctaacctcgggcaggtggctccgttggcttcctgcacacaaggggacaagcaggtggccccgcccacctcacagggcactggtgccaattgtgttgcagcgctacaatctgggagtggcccaactgccattttctgaacatggataatagaaaatgtcagcccaggactcgatccaaggcctggagcacggcgaggcacctgtgacatccaatctccccagacaagccaaacccgcaggctggcctccctgtccggaaatcctcagggcgagagaagtaggactgtcatggggtgattcctctttggggtcgtcacacaactcagcaacaaagggaaaacagcactctaaagaatgcaaagaggccagcctggggctcacgcctgtaatcccagtaccgtgggaggccgaggcgggctggatcgcttgagctcaggagttgcagaccagcccgggcaatgtggcaaaactctgtccctacaaaaagaaaattagtggcggggcacagtggctcacacctgtaatctcagcactttgggaggcccaggcaggtggatcacaaggtcaggagtttgagaccagcctgaccaacatggtaaaaccccgtctctactaaaaatacaaaaaaaaaaaaaaaaaaaaagaaaagaaaattagccgggcatggtggcacatgcctgtagtcccagctactcaggaggctgaggtgggaggctcacttgagcctgggaggtggaggttacagtgagctgacatcgtgctactgcactctagcctgggtgacagagcgagaccatgtctgggggaaaaaaaaaaaaagagagagcacaaagaaactgtgtatgaagccagggaaaaggcacagaggcgcagctgcctttcaaaaggctgttcctgcactcagcttggctatggccctggctgagcccacggcctccctgtccactgctgctgaggagggagcgagggaggcactgcaggcgtggcatgtctggctggccacgaggatcctgacctggacggggcctccctggggcggcaggaagagcgaccacacccgctatgcctgccgagcccaggccgagagacagctgccaggctgcgtgccacatgcccctgccaggaggggccgtgcagttcatgtcttgttgaaatgtgccaggtgctgaggtctaaaggcatcctgtgactctgtagggcagcagctctcgaaaggcagatcactgacccccaaaagacctcagcaccaaaaccagtcccacccatcatgtctgcaaagtgtagtgggaattcaaagtcacctggcagatgacagagcaggtacagggagtggctgctcggttagggctcggcaccacctcctgaccagcttgtattggggtgggcttgggtcaaagcacctggctcattcgaggggacccttggccctgagaggttgcaggtcagccccaaagatgcttgcgccaggcccaggctgggcaggctccctgccgcacactgcccaagcggagccccccatggcttcctaggcctctcctcgcccccgcccgccttctctccccaagccttcaggtgcagaagcttcactgccttgggagcccttggcctcccttgctgccagacacccccatcccaggtcagcaggcaacagcccggcactcctgtggccatggcatggctgagctgcacagagaggcggacaggcaggagtgccgaactaccatgtccttcaacagtgaactctgtgcgtggctgtcttctcccaaggtacactgcttccaggcagggtctgctattgttctgagctgtgggtctgccctaacttccttctgggaaggagacaccggtgctgtccaccaccactcctagaccgtgtcaacccagacgctcaatttgatcattcagtgagatgtgggaataaattctcaggttcatcttccaccacccaaatcccttccaggccaaagccacttgtcttttgttatttagggagtttatagttgtctccatatgttcctaaacagtgctccttctggccaccttcctaaattttctattcaactgagcagagaagctccagggagctgcagaccttccatgggacccaacaagggcaggcatggagctggacccagagccaagaagaccagacgacacaaatcatgccttcaaagaagaacccaggagttcaacccaaaatgctgatcaacttgtatagtttcctgtctccacctccagttctgggaggtgaaggagtgaggctgggcggtcccagcgtctcccgggcctgggagaactcgtctctctttccacacaggggctgggatgaaggcaggcaggctaacattgcagtaggagatttaggagcttcgtgtgtaagggcgatgtgacacgggccccctgtgcagaggcctggaccagagccgccagagtccccacgagcctccagggtaatggagcatcagaacgattccgctcttaccacaagtgaggcacgaaaaagtacttcacagaaaaaagacaaaacccaaagacgacactgggacacgatgcgagaagatggacatgggacaccgccttacgcaggctctcacacagaaggttaatttctgcaccctgcagagatcctacagaacccccaaaccagtgggaggagcgtggtctgcagccggggtacccccatgctaaccgaacacagtggctttgagtaggttctctatgctctctgggacatgagcttttcttttttcctttgttttggagatggagttttgctcttgttgcccaaggctggagtgcaatggtgtgatcttggctcactgcaacctccatctcccgggttcgagtgattctcatgcttcagcctcccaagtagctgtgactataggcgtgtgcccctatgcttggctattttttttttgtatttttagtacagacgggatttagtcatgttggccaggctggtctcgtactcctggcctcaagtgatccgcctgcctcggcctcccaaattgctgggattacaggcatgagccactgcacctagccttaaacaaagaattttaaactctcgctactcaacatgtggcatggggccagcagcacaggcaccggctagggctggtgggagatgcaccacccaggaccgtggggcacaggcaccggacggggatgtacatgctcactgaagtctcacaaagcccctgggaagtagtttttattgccatctctccgttttacaggtgaggcagttgaggcttggccagttgaggtgccccaggtcccaccacaggaagggtggagccaggcctcacacccatatctagttttaccccagagtttgtgcacagttaatttccacaatgacaggtctcaaatttaaatatcaaataccatatagacgccctcagccccttttcagaaaaactaccctgatgcccgccttgtgtgtaaatataaacatatacagacaaaactgtgcacaaactccttatgcttttctttcttataaaactataagtaaaaacaaatgcaaattaagcacagaactttaaaatgactacatttcagctccacagcacactagtttgcaaggggtgatcgtgcttgactgatgtgcatttggtctaggacttgctcctcttgggaaaaccaacgtctatcaccctgggctggcagtgacaacgcacagaccactgcccctcttagaaccatgagatcgctttatgcagagccctatatcgtaactcggtctctgctcagtcacagcacgttctccctttgtcagagcgtgataaggtgaaggagcatcactgggcactgagattgctgggccctgctgaccatccagaaaggctgaaaggagcttattcatttcaagattatcatcaaaatgaaaaaccagccactctggaggctgacgtgggaggatcgcttgagcctggaaattgaaggctacagcaagcgtgattgcaccattgctttccagcctgggcgacagagccagaccctgtctcaaaagcaaaaggaagaagactgaacgtctgtagagagagctgcttgcaggccacttgctctcccactaaaacagacatccctgacagcaacttgagaccctttgcatacggagctggcttctttctcaggaactcagggtttaaaaagcaaactgtgtatgttgttcccagagggaatcagcctttcattctcatagttgttaaactcctggtttctgatgtgtttgcttcttaaagtatgtgtaaagattattttttatttttttgagactgagtctcactctgttgcccaggttggagtgcagtggcacgatatcagctcaccataaccttcgcctcccaggttcaagcgattttcctgccttagcttcccaagtaggtgggattacaggcacctagctaatttttatatttttagtagagacggggtttcaccatactggccaggctggtctcgaactcctgatcttgtgatccgcccacctcggcctcccaaagtgctggggttacaggtgtgagccaccgcgcccggcctgtaaagattatttctgagccgggtttctgctcttcttctacttacgaataacacccgtatcactctgcagcagcacatttgttgaaagatattctcaagaagtgacaacttctgggcagaaattttattactttttaaataaagccacgataaggctaaaggtaataaaagaaggtgacattttaatacaccccctccctccgggttgactaatcaccatcattctaatttcagatgagtcactggctagagcagaatgttaactgggcctcactgccatgtctctctctcacatacccctatatgaacgtaattttccataggtcttcttgtggagatggagtctcattctgtcacccaggatggaattcgtggcgcactgagatagctcacttcagccttgaactcctcagctcaagccatcttcctgccttggcctctgtaggtctttataatactggtgcttactctaagctcttgtctggcggtggtttgtggcttgtgtttagcatgtgtactttgtacttaaagtttggtggtttcagcaagttctcgatatccgtgtctggacctagacaagttaaacccccatcactgaaagccacaacacagagaaggtagtttttatggatctcaggacgaagcatgtggcagtgaactgctctctcctcctcagtgaaatagtttcgtgtatgagaacaggcatgacagactttacaacatgtgtgagctttacttcaccgtatgttactccaccaagggcatcccggcgagcttaccttgtccctcccaatcggaaggggcatggctgtgtatagattcttcctgccgtcaaacacgggcttccgatccccaaagatctgtgttttaaagtgctggaccatgtgttccacgatttccctgaaacaaagacaaaagtcgggcaaaatgtcaataaaatggagaaaatggcatacaaggacatttttctgacgctatttttttttttttttttgagatggagtcttgctcttgtggcccaggctggagtgcaatggcgtgatctcagctcactgcaacctctgcctcctgggttcaagcaattctcctcccttaacctcacaagtagctgggattaacgccaccacgcccggctaattttttcttttttttttgagacggagtttcgctcttgttgcccgggctggagtgcagtggcacgatcttggctcactgcaatctacgcctcctgggttcaagtgattctcctgcctcagcctcccaagtagctaggattacaggtgcccgccaccacacttggctaattttttgtatttttttttttttagtagatacaaggtttcatcatgttggccgggctggtctcaaactcccaacctcaagtgatccacccgccttggcctcccaaatgctggaattacaggcgtgagccaccgcacccagccctctgatgctatttttaaagcaattttgcaagacctgtggctcctttgggcaacatgacttccaacttctataaagaagcaaactagacccatgagtgggtttgtgcttgtgcattttagtgaaacacgggagaacctgatacgcgctgggcactttatatgccacatacagcagatgacagacacttccagaacctccggagctctgtgaaggcactgacgagaagaacagagcttgtgacatttgtgttccatggaggtagggtcaggcgcccatgcctctgcacagctacccactgtgcacacagactgacaggtgtggctcagctcggctgtgggccttgctgtggccactaggatttgctctgtagccccagtcaaggggtttgtgagactggcttggccttctgtgctcctctgattgccagaagaatgagtcccgggtgctgctacccctccagtccagcctgacccaggggcccagccaaacctcagcccacttgcagagccatggtatgagacggatgcttgctgctgggagagactggggttttggtgttgggggctcaggcattccaatggcagaaggctgctagatgcaagggagctgctctgcagggctccatgagcagagatccacgacccccaccctccaccccccaacccccacttccccaccgtgacagagaggcctccagaaacacactctgcaaacctcctgctggccttcagctctgttccaaagaggtaccagcttggcatagtactctcctggcatttcaggtgcttgttttattttattttattagagacagagtctcgctctatcactggagtacactggcatgattactgctcactgcagccttgacctcccgggcagaggcaatcctcccatcccagcctcccaagcggccggaactacacgcccaggccactatgcccagttaatttttaaatttttttgtagagatggggcctcccttatgttgctcaggctggtctcgaactcctgggctcaggcaatcctcctgcctttgcctcctaaagtgctgggagtaccggcatgagtcactgtgcccagctcaggggggttctgaggcattttgacccaactcactaaatgcctgccctcgcacactacgcctgataaagtgcaaatatgaagagctggggtccctgcctgcccacaaaggcccatgtgagggaaatgcagaggcccatggggtgcttaacatcttgattttttaccaggaaatgccagctcaggggatgtggtaaagagcgagagaggagtccaccagcagggtaaggtgggggcgggggagtcactgacagacttctgaagggaggtgggattggagcgtggctagaatggtctttctcttgggcagagcctcagtcatctctcaggaagcaagaacctgccaactccttccattcctttcccaaaagtcgaggcaagctggcctggagggctttccttattcagaatggctttgcttggtccacctccaacagccacaggaagagggtctcagggatccagctaacctgccctcaacacctgcggtctggggagtgcccgtggcagatgcccagagcctctcagtgacatctttgagggctccaccaagctgcacccgcctctgacagtgctgggagatccagcctgggcagggaacagccccgaaggccgtcagcatggccctggcatccatccctgccatgcctacctggcagccacggcacaatctcccctggcacctccctggcagccagggcacaatctcacctggcacctccctggcagccagggcacaatctcacctggcacctccctggcagccagggcacaatctcacctggcacctccctgacctgctctgggctgcccaagacaagggatgccctgcagctctcgcaagaggacagctcattcctctgcactctccaaacattacaaagggtccccaaccttcggaggccctcatctccctggccaggactgcacaatcaacttgaggtgcagatggctccattggaggggaaggtgggttctactcacattcaaagaacaaatcattctggcctaattcaaacctgacctgaacagagtaagatggcacacaccctgactcatttcatgaggctagcaaaacctttaggttgaaaccagacaggaagagtactaagaaatcatgggccaatcacttacaaacagaagcaggaacaagacattaacaagctgaatctagcaacatgttcaaaaataaatcatcatgtcaaagttcagtcgataccagaaacaaaaggttgtatttaacattataaaattaattaacatgaaacaggttataaacctaaaagctataactgagaaatgcctagaagaaaacataagataaaaacgttcctaaaacttgggatagacaaaaatttctaagaaatgtccctaaaggaaaaattcataaactaggctccattaaaattaataactttcacccatctcttaaaaaaaagagagagagaggcaccattataaaaatgaaaagacaaggccaggcgcggtggctcacgcctataatctcagcactttgggaggcaggcggatcacttgggatcaggagtttgagaccagcctggccaatatggtgaaaccccgtctctactaaaaatacaaaaaattagctgggtgtagtggtgggtacctgtaatcccagcaacttgggagactgaggcgggagaatcgtttgaacccaggaggcagaggttgcagtgagccgagattgtgccactgcactccagcctgggcatgacagagtgagactctatctcaaaaacaaacaaacaaaaacaaaaagatgagcaatcaactgggaggaaatattccataatcacaaagacacacatctaacaaagaacttgtatgcataatgtatttaggaaaattcttacaactcagtaagaagataatccaacttcaatgagcaaaatatttgaccagacacatggcagaagaggatacacaaatggcgggtaagcacatcaaagggtgttcatcactcggctttagggaaatggaaatgaagccacagacatccagcagaaaggctaaaatcagacagggtaacaataccaagagctggtgaaggcggagggaaatgctctcttctacgaggctgatgcaactgctttggggaaaaagtgtggtttcagtgtctatttaccaccctgtctagcaacttctgacacaagaaaaatgaaaacacacatccacgcaaacatttgcatacaaatgtgtataacagctccagactggaaacaattcaaatcaatgtccatcagctgatgagtggacaaacccatgatgccacacccgcacaatgcaatacttgaatccaccgctacacgcaacacgacgggtgtcttagaaacacgcttggcgggccaggcgcgatggctcacacctgtaatcccaacactttgggaggccgaagcaggtggatcacgagatcaggagatcgagaccaccctggctaacacaatgaaaccctgtctctacttaaaaatacaaaaaattagctggacgtggtggcgggcacctgtagtcccagctactcgggaggctgaggcacgagaatggcgtgaacccgggaggcggagcttgcagtgagccgagatcacatcactgcactccagcctgggcgacagagcaagactccatctcaaaaaaaaaaaaaaaaaaaaagaaacatgcctggggaacgaagccagccaccaggaggaacaggtatacaatgataatgattccacgtataggaaaccctttgacaggcaaaaacaatctacactgacagaatgcaggtctgtgtttgccttggggcaagggacaacacacttaactgcaatggggcaggtgctttggggttgttagcatgtcctattgattgtggtggttcttacaggagtgtataccttttttaaagatcataggcctacataaaggtaatttcagtaaaaatccagagagggatgtatttttatttgataggatttaacaaactcatcctaaaatagaagtagaaatctgaggacaaaggctggcaggtattcttgaggaggagcagctggagggaggccatggcgctggggcaggcagagagctcgggacagagcccagagtccagagcccagaaacaggcccagggatgggggtggcaggagacagagggcaggacacacttctcaatgacttatggcaggcaaccacacacacccaggattcaaggaaatacaaccgagccccactactggagacactcctctggatgaacattcactgttccgagccccatccagcactcggcatgatcactccgctcactgacggtcctgcaggcccctggaggcggggtcaggtccagctcatcctgcacacccagcacggcgtgcggcttgggctgggcggatctctcaagagaaggaggctgttcggtcatgccagtgaggcagtgccctgaggggctacaatgcacacccgtggagtcggctggcagacaatcctggccaccactcaggcctccgccgcccagagagagcatccctggccaccggctcgcagcccccatgcctcggggcccagtgccgagggtgaggaggggccgatcttgtgtaaagcagagaaactggacctcgtggctgtggcagcaggatggcaccttgctgcctaattctaacacggggggtcccttccctcctcaaacacacatgaccacgtatttggcagttaattttctttctttgtaaaactgtgataaaatacagataacataaaattgaccatttcaactaagtgttcagttcagcggcattgagtgtgtccatgctgttgtgcgaccatcaccaccctctgtccacaaatgattttcacttccccaaagtgaaactgtacctgtgaggcactaacttcccagccagcccacggagccacctggggaccctgctcgcggagtccctgaatctggtccttcgtttcgagccggcgcaggcactggaaagtgagcaagcgtccctgcttctgcagagccagctctgctggccacccaggtctcaggcttgcccttgacctcccaaaaaagatgacagcccaggagttcatttgcatgcattccgtccaccagtggggccccagcctctaagagagtgacccatgttgaaacgaaggaaaaggagaaccacggccaagctgttagtgctcgttctgccaagttcttagtggggacagctccctcttcagtcgccacccagggaaagggcagcgccaagcagcaccccgcacggggccggggccgccttgcagaagccggagcgtgttgctaatgccgagaagcaagtgtctgccccgtttgcctgtttgcccttttgtcataattctgagaggttccctcttttacaaatgtcatcctttcattaatttctaattacacagcttttgccttaatacattctcaccaaaagtttcacataacgataaagctaaaagtcccagcctgggcaacacagagagaccccatctctacaacgtatttaaaaattagtggagtgtggtggtgcgcgcctgtggtcccagctacttgggaggctgaggtggaaggattgcttgacctcgggaggttgaggttgcagtgagccatcactgcgtcactgcactccagcctgggtaacagagggagacactgtttcaaaaagaaaaaaaaaaacaaaaagctaaaagtctgtttacagtacccactcatttcaatccccattctaagaagtaaccttatccttttcaaacctatgctttcacataaacacacagctatccagaaatacattgttttattatttttatacacatggtatcaaacccacacttctgaggcgcccattttcctactctgtgtctttgggatctttcctcctaactgtatacaatgtcgccactaggtctagaactacagacacggtaatcatgtgccttagtgttaccacctaaccacttgctacttagttgcctgtgtttctgagcttggaggtcagcctgggagccccattccactcctgctaagcaccacactgcatgccccagcgcactcctctaacccaccacttcctactgatacttagatggtgtcttttgttgttcttttttttttttcagagtagtcatcctatacatctccttgagatatagagactgagaaggagaacgggtgggtcagagggtacacgatgtttctgctttaatacctgcaatacccgcaccagactgtcttgtaaacaggcagggtccacctgcattcccgtgagtggctcatgcccagagtcacagagctctaggcgcaaggctgagtgtgacacagccatgctgcctggccccctgctccacaggcacagggccatcgcatctgctggttcttctggggccacttgacggagctcaagacgaacaaggaggaagaggggcaggggaagggagaggagcccacctcctcctcgcagcccacccgtgcttctcggaacagagcatgggggcaaggcccacgtgacttcagcaaggcttaggtcgtgtgggccttgcccccattctttctcggggctggctcaagactggctgtgttgtgcagccaccttggtgcccacagctgtacgggacgctcctgggaggaagggtcttgcttgcaccaaaccccaccccggcagccccgggaaaggggtggactatactgcagggcctgagggcactgaggctgcttcactgtgtagttgtcagaatgtcacagaggtaactgaggtgcaagggcatttttctcatggccttggataaagcctctgtgttggactcattaaacatctacccggggcattgtacaaggttttgggaactcacgactaagacgccatccttgctctcacagaggctgcagtgtggtaagagaaatgggaaggagatgctgagcagcacgacggaggagcccagactcatgatgggctcagggccccaccttcgtctccctttccactcggagctcccctccagcggcgctgaccatgagcaccatccacctccccactggggacaggagccatgtctgcctcagccaccactgcacccccagggcactgcaactgatgtgtgagcggggggtctcaggaaggtgggtcatgggaggaggcaggaggtaggccagggctcccacacaggtcttgtgagcacaaacattttacttctgacattttcctatgctgttttgattgattataattttgagatagggcctaaaggttcctccgtctaggcagccactctcaagcttgctcatagcctagcaggttggccttggccctgtgcatgcagctcttgccctgcatttgctgcttaccaactgcgtgacctgagcctggcaggcgaaaccacaggagtgtagtagcacagtcctggaaagacatcacgttctcatcaccctcagcttctttctggtgtcagataacgaagccttggccatgcctagtttcgtaaaagaaagctgcttgtgtactgtggtcgatggcctaagggcccccctgctaccgcaccagtcaacagcccagaaaatgtgggccaggcacagtggctcacacctgtaatcccagcactttgggaggccaaggtgagcagactgcttgaggccaggagtttgagaccagcctgggcaacatggtgaaaccctgtctctactaaacaggctcacgcctgtaattctagcactttgagaggccaaggcaggcagatcacaagacgccaggagtttgagaccagcctgagcaacatggtgaaacccagtctctactaaaaatgcaaaattagccgggtgtggtggcgcatgcctgcaatcccagctactccggacgggtagctgaggcacgagaatcgcttgaacccaggaggtgaaggttgcagtgagcccagatcatgccactgcactccaacctgggcaacagagcaagatcctgtctctaaaaaaaaaaaggaaatgtgtatactgctttatgctctcattctggttctaggagtaccccctaaatcacagattcacacagggttctatcccagggaaacgcaaaaacaaaccagcagtcccactgatggagagccacacagcagtgagatatactaaaagatctaggaagacctttagtaaagaaagctgcttaacccagtggtgcacatagtttttgttcagaaatacatggttttagtaagtgcatatttaaagaacctcatagaactctcaacatactctggacatgttgagtgaatccaactgtttagttttacagatatgagaactaagtccccagacattctctctcttagcatattcagagttctgcaaccatcaccatggcttagaacatttttaccacccccaaaatcaacactatactcaacagcagtcactccccaccattccaggaaaagaaaaatttacacaaccatttataatagcatccaagaacatagcatactttagattcatagtgaccacaataaaaaattcaaaggggctttctagcagaaattgataagttatttatatttattattctatatacttggaaaagcaatagatctagaatagctaaaacaattgtaaagaacaacaaatttggaggaattatttaatcggatttcaagccttaccacttaactatagttaaaatgaccaagagttcctggcctaaagacaacacagaagagaatccagaaatagatccacccacatatacaggttgagcacccctaatctgaaaaccccaaatccaaaatgctccaaaatctgaaactttatgagcaccaacatgacgctcaaaggaaatgctcattggagcattttgggtgtcaggttttcagatctgcaatgctcaactggtaagcgtaacggaaatattccaaaattcaaataaataaataaataaatgaaaacttgaaacacttctagtcctaagcattttcagtaagggatactcaacctgtacaatcaaattattttttttaaaggtcaacaggtaaatcagtggggaaagaaaagtattttcaacagacccttacctcacaacatacataaaaattaattcaagatggatcgtggactaaatatgcaagcaaaaactataattctaaaataaaaacaggagaatatctttatgatccctaggtaggcaaaaatttcctagagagaatacactatgtaacagctatttttaaaaatttataaattggacttcaacaaaactaaaaagttctactcattaaaagaaagacaccaacaggaaggtgagatgacaaactttggactaggagaaaatattcccagtatagacttgtatgatgctgatttttaggtgccaatgtgtctagattaaagaataatccagagaactggtaaagcttgacttctgggcatgtctgtgtggctgcttccagaggagactgcgtgttagtcagggaccaggtggggatctgcccccagtgtgggtagtgccatccaatcagctggggacacagacagaaaaaaaggagagaaagagtgatttcttctctccctcctggggctggggcactgtcttcctcctgcctcggacatcagaacttcaggctcccttggcctttgggctctaggacttatagcagcagccctgtgggttccaggtctttggcttccctgattataaggctttcagacttggcctgagccccgctactgacactccagggtctccagcttgtaaatggcctgctgtgggacatcttagcctctacaatcatgtgagccaattcccctaataaatcccctctcatatctatagatatatgtacagtcatgcgtggcttaaccatggggatatggcctgagaaattcactcaggcaatttcattgcagtgtgaacatcatagagtatatttacatatacccaggaggtagagtctaccacacacctaggccacaaacctgtacagcacacgactgctgaacacggcaggcaattgtaacaccatggtaaggatgtgtacatctacatatacctaggtcgggcccagtggctcatgcctgtaatcccagcactctgagaggctgaagcaggcagatcacttgaggtcaggagttcaagagtagcctggccaatatggtgaaatcctgtctctactaaaaatacaaaaaattagccaggtgtggtggcaggtgcctgtaatcccagctacttgggaggatgaggcaggagaatcacttgaacccaggaggtggagactacagtgaactgagttcatgccactggactccagggtgacagagcaagactccatctcaaaagaaaaaataaaaaaatctaaactcagaaagggtagcgcattgctctactacgttacgtgggctatgatttcagctcccttacaatcttttgggaccacggtggtatatgtgtctgtcactggccaaacgttgtcatgcggtacatgactgtatctctatcctattggttctgtcgctccggaggatgcttacaaatgcaatgtacatctagaatatactaaaaactctcacggatcaataacaaaaagacaagaaactcagtaaaaaaaaaaaaaaaaacaaaacaggcaaaatacttcaacactttgctggaaataatatatcacttaatcgatgaaaataatatataaacacatggaaagatgctcagctcatcaggtaccagagaaatgaaaattaaccacaatgagaaaccactactcacccaccgaaacacacaaaaaaacacgcctgaccacaccgcgtgctggtgggggtgggtggccttggaaacactcagcggagctgacgggaggaaaacgtgatgggagcatgggaacaccatttatttggcaggttcacatgcagctaaacacacagctgcccttcggcccagcaattctactcctaggtatttatttaagagagacgaaaacacctccacaaaaagaacttcaacaagaacgttcacagcagtcttattcataatggccacagcctagactgcccatgtgtttaaaaggaagatgaaaaacagactacgaaataggcaatagagtatttagcaataaaaataagctacaaatacacacaacggcgcaggtgggtctcataaattctgctgagtaaaagcagtcgggattgagggtgtgtcactatacagacctggaaactaatctatgtgacacacatcagaatgccgtgactttaggggctgggggtaaccggaagagggtatgaggcaactttctagggtgatcagtatatacatttgtcgaaattcttccagttgtgcatttacgatgtatgtatttcactatcctgaaactgtgtctcaatacaaaaacttggtatatatttatatatatatttttttcaatccgtaggtttgactctgaaaaactgtttttgaaaagcaaatgcagctgaaacgttctggaaaaaacccagatggatctgctgagaatttcagagttgattagtttaaatgccgtgtctgtccgcgcagaccacttacacaggtcatgaaggatgaaacgtaatacctgttaactctcctcgggcacttctctggcttgatatccaattcataatgatagatgtcaattttggggatgtccatttcgaagaaattggcctgtaatttgattgttctcccggaggtcccaaagtcgggtctaggtggaggcttgaaggcatatccttggatggggggcggcggcgcaggaggtgcaagtgctggaatggcagagagaacacccattaacgggggagcaggcttgctctgcggcccttcccatcccgcggccccaagccactatatgcccccctctgctgtttccattcacgtccaggccaatattgcattccacagaggaggcgtctcaacgtcaagccaataatgtacttaaaatgtatcataacaactcattggtgatcaaacttgctatgtccattcctgttctttcttcctgtctcagacactggagagatgaggcagcatgaattactagcacgggagacaaggcaaagagcccaaaagtgtcaaggcggtgcccctcccttgctgctgcttaaaccgctcgtttactcaggaagcgctttttactatgcataagcggcagaaacttcatcccaactcaagttttcagtggctccatattagtaaagttcaaaatgtagatttagaaaaataaacatttttcaataatagaacgctttcaattttcactcaaatgtctgtttaaaaaaaagacaacccttctccatttaaaaaaaatcacatgtacttcaatccctattgacattcactggaaagaaaaagaactctactaaaaataatatgagctgttcttactgtatttctgacctagaaaaactcagagactccttgaattatttgcttttttgtttgtttgtttcctatgagaaaactaacatgctttcaaggttattaaactcactgagttacaccatttggaaatggttatggcagcatggccttccaccaagtcgccatgacttcatagatgacacatctacagacttccatgacactccacccttcaatggcactcagcgggtgcccctgtgggctgggcaccatgccctgggccaaggctacaaaaataaagtcaggctgggtgcagtggctcacacctataatcccagcactttgggaggctgaggcgggtagattacctgaggtcaggagtttgagaccagcctggccaacatggtgaaaccctatctctactaaaaatacaaaaattatctggatgtggtggcacgtgcctgtagtcccagctactcaggaggctgaggcaggagaaccgcttgaacgcggaggttgcagtgagccgagatcatgccactgcactccagcctgggtgacagagcgagactccatctctaaataaataaacaaaacaaacaaacaaactgagtcctcaagcagcacccatgctgccaccagggacagtttccaggtgtcagtcatccacaggatgacgtctgatgacttttcataagctcagcagctcaccaagatccttcccagcaaggaccctgaccgtgacagggagtggacatcacagtccaggtgggttcagtggagacagccactcccctgaggaccgactgagcttctctctacgccacaccggagtagaacaaagcacttgccaacacgtggccctgttctcaggtggctccaaccacccagtgagacggctcccaggaaacgtctaggacagagcccgggaatctggccctgtggccaatctcgatttcagggtcgggcacgctcctctcggggaggagagtcactgtccttcggtgactcccagcttacaaggtgctcatgcagttacttaaccgagcctcacaaccataccacaaaggggcacaccgctggctgcaagaaggttttgggctggaacacgagctacttgcaggtgaagcaaagctgctgggccggctccaaaccaggcccctccaccgggcccccaagcagagtccaggcacagacgcagctcgagcccagggctcaggctgaccctatttctcctaagaagccttccccgagactacctcctctgcaacacctggcatgggaggcgggaaacctgcacgcagcctggtactaacccctgtgaataaaggcaatgggaaaacacagcggtaattcataaaacatgcaatttcctaagatagttctttcttgcttctagctttcaataatgaaaatactgatacttcacgtgaaggcacgtggaatataaaattacaagttaaagatgtaaaagttttccaggcagaggggccagggaaggtccaccttcccgtaccttcaggaaggcaactccactgccaaggacgcctctgcaggccttagaccttggggtgcctgaaatccactctgatcactcacagggagtcccacgtgtaagctgcagatacaagctggaggatcaaagccaaagcgtgcaagaggagacagagcagaagtgtgcagacacaacccccatgcacgaggaagatggggatgacaagaagggcactggatgcccaccctgggctgtgagcccctggccccgacaggtgaataatgcaccaaggtgtggaccacatgtacaagaggccacaagacacggatgggccacatacgcacttgtcacatttgacacggatggttccaaaagggaattctaacaccacctagggatgcgctctccatgtgctctctgttaaagaaacgaaagcccacaaggaggagacatctgggatgccttcaccaagaagatgccaccacactggcattcacggagcaggtcctggctcccactgcctgtccaacagccgagtcccaaatccctggcctgcatccaagactcgacctcacctccccactacttccaggcccactggaagcagccatcctcccccatctcctccatcctccaaggatgctccaaggagtaatcgaggttccacctctccgtggacgctctctccagacaccccatgggcacctcctccccaggccacaggtggcacgccctgccacatgtcctacccagtcttattttaaatgggctttaaatgggctttcagttgcttccataagtgttagtcttgtctctgcattgaaggttgaaacctttgggaacagaaaggcaaatcctttcattcaggaatcccaggattctagcacagcgcacctcagtcacactgcaggctcggttccagattgccacaataaagcaggtcacaccaatgctttggtgtcccagtgcatacaaaagttgtttgcactatactgtagtctaccaagtgtgtaatagcagtgtgtaaataatgtacatatcttaatttaaaaatactttattgcttaaaaaatgctgacagagacactaagtgagcacatgttactggaagaatggcgccaaaagagttcctcaggctactacaaacattccatttgtgagggaaggagggagggagtaaagaagggaggcagggagagagggagggagggagggagggaggaaaggaggaagggaaggaaggaggaaaggagggagggagggaaggaaggaaggaaaaaagcatacattctttgtgcagggcaataaagtaaggtgtacctgtggttggaagggacctcagctgctcctgggaggggcgatggctccccggggcccagggctggcgggccctctgcacttaaggccatacccattccttagagagcgagttcggagggcaaggcccggaacccagcgcagcgtcatgtacacagccgtgccgtgttcactgaatcggcatcactcagcacatttgtttaagattccatttttagagccgcatctcacacagtgaaagggaaaaatagtgaatgagtaatcggcttcctgtgtgagcaactgggtcacagggaacaaaaaatttcagtatacacagcggacgtcagcagaggtgggcggcaggcgagcctcctgcaggagcaggcggtcccctgaagaaactcctttcggagttggctcctccccgacttttcagggagggatgtggagcagactctgtgccacctgccctgagggccatctaagtaagggacagggatgggggaaagttggtgcatgaagaataaagtgcaggcctgccaggattccccgcagacgtgtaccctgaggcggggagagcagctgcagaaattcagagtcattaaataaatgaatagcccagctcttccgtgaagccgctttggctaccggcgggtgaaccacaggcccgggtcagcacccataggctgcgcagctgccacctgagcttgggtggcagcctcgctgtgaggctggcacaggggcccagggctgtctcctaggaagccggcccagtgctcagcacccatgaatcaggggatgtaaacggttaaacatctgccacccaaatgacatgcaaagctgtttccagagctccaaagtgagtcattattcaaagccatgcttcccgatggtcctcctagaactctgcattcattacactgggcatcagccagaaaacgtgcaggccaaagaaagtgagaaggatagctcagggctgctaaacacttctgtgccataccctgggccaagccaggtgcagatatggtctctgtgatgccaggacaggatgccctggccaggcaatggcacagcagccaccgagatccgtgccatcagcacgagccgcagaacaggacggagtgatggctcagtgagtacagaccagagagtagatgctatcaagctgtactctcctgctaaaatcaggacacgagggtgacaactcacctgttgtctacacaagcaagcctcccttatggccacccaagttgacgctaaacacagtcatggcagcttttttggtgaaatggacagagacggtctcagaatgtgtgctgggaatgcagtcggaacatctgctcctgtcagccggagtgcagacaactgtatgctgtctcccatgccaggcccgggccaccaatgagcccacggtgagccgaagtcaaagcctcacccagcccacgttcacagagacgcgtctggcccaggcgtcacagctgtgcagggatggctggagctgggtccccagctgatgcgttctaccccctccccccggtctgactcccaaactggggcaaactgacctcgacaggggctctggagccccccagatctgtgaggacacaccaaaagtcaaatgtgacaagacggggaggaaaaggaaccctcgcactttgggggtcccaggtccctggccacagaagctgcccaaacacggacgccgaggaagcggaggcacagatgggggtcccaggtccctggccacagaacccatccaaatacggataccaaggaagcagaggcacagatgggggtcccaggtttctggccacaaaacctgtccgaaaacagacgccgaggaagcggaggcacaaacatgccccacggtggaagggagtcaacagaacccacctcgctggccaccggtcacccacctccacaggggaggctgctcctgcctctagccagagctctgcatcaggaaggaagagtgcaccctccagccctgagcaggagccactgcatcagtgctcctcggaaccaggggcatcgtctcaggagccagctgatgccaccaagggggtctcagtgtggcaacggggagctggtgcacaggctcagagaatacgttctggggaatgctggccatcaaccagagccctagggcccctttgccctggggacagatcctgctgcagcctcaggacctcatgggtcccagcttaggaaatggcccctacccctcctcctgtgggcatggggacacaggatgtagccatccaccactgctccctggctgcatccacacgctgagaaggagcttttgccttcactcccttgggcccatgggaaggctgggtcggaatgaaggagggaaggaagctctgggtgcagctctgggtgcagccccgggtgggggcagtcctcacagcgggggcagcggagctgtcctcagcagcatcttcgcacttctgttgagcacttctgtgttctgcaggcgcggttcctggaaggctttcgtttctgttctccctgagtagaaattattggagcatttccaacctgtctcagcctggttcttggcaacaccaaaagaatgggccatgggaggcaacgtgagcaggggagcagtcaccccaaaggcaggggctgtagaaggtgctgggcaaggacagcagggagaactcccccagggaagactggaacgctgcgctgaggccgacacaggcagcctgcgcctccagatcagactgatgatcatccctaaaccacttgctcccctcttttggtttaatgagtaatagcctgaaaatatgttaaccttattttagtgagcaatacagcgtgcacaggaagagcatgacacacccgtacagtctaggactgactataaacaaacacctaagctcccgcagatgactaaccatcaacacggaatttcctgttggggttttttaaaataaatgtttgtggttcaacctgaaactgcaaccaccattatctctttgagaaatggtcctgaaagccacccctgtgatctttacgaagaaaacttttccccataaattatgaatacatttttcctcacaagtcaaaaacatcctctttgatccaccatctgtctttactgaacaatattagaaatactgtaataaggccaggcacagtggctcaagcctgtaatctcagcactttgggaggctgaggcaggtggatcacctgaggtcaggagttcaaggccaacctgaccaacatggtgaaacctcatctctactaaaaatacaaaaattagccaggcatggtggcaggcacctgcagtcccagctatttgggaggctgaggcaggagaatcacttgaacccgggaggtgaaggttgcagtgaactgagatcgcacccttgtactcctgcctgagcaacaagagcaaaactctgtctcaaaaaaaaaaaaaatactataataaagacaaagaggaattaaaggaatactggtaaaatgtaagttatctcctacagaaacattccccaatcggggcaactgatgagaccacagcatctcaaccaccggccctaccaagacagacccgcacgctggtccagggctgctcgaagcctgacacctctcagtggagacatgaagaatgccttatgcgtacatttctctgactcttctctacagccttttctggtttcaactctagatttcttttgtgattccgactctgtatctgcctctcccactagaatgtaggcactgcaatatagcaaggactgtgtctgtttttgtgcaactgttgactgaatgaatacacagatgaataaaagaatatcttcttgttacaccaactcttagtaaaaatgccttatgggtttatgactcaatcccaagtgtttttaggacaaaaccataaggtatccataggaaggctattactctaccttttacaaatagtctttactgtttgtttgtttattttatattttatcctttttagtagagacaggggtcttgctatgtcacccaggctggtctcaaactcctggcctcaagtgatcctcctgccttggcctcccaaagtgctgagattccaggcatgcaccacagcacccagcctgtttcaactaagaagccaacatttctccagcatcaacattactccagtacaagacttccagcacattcttgtctcttctcatgtcctcgctcttggacttgtcttcattgcacagctgaggagccaggagctccatggggtgaggtgacagccagggcacctgggcagcagaccacagggctaggactgtgatttccagtttgcccctccaccaacatcagccatcaaatcagctgaccgccctgatgagggtccatgtgacatctcttgtacttcagaaagagtcttgttctccaaactgaatccttttttcacccaaaacatacaagaatctgacctacctaacacatgtatgttccctgaaaatatatacacctattacgtatcaataaaaatagaccaaaactttttttttgagatggagtctcgctgccgcccaggctggagtgcagtggcgtgatctcagctcactgcaacctctgcctcctgggttcaagtgattctcccacctcagcctcccgagtagctgggattacaggcgtgcatcaccatacccagctaatgcttgtatttttagtagggacggggtttcaccatgttggccaggctggtctcaaactcctgacctcaggtgatccacccgcctcggcctcccaaagtgctgggattacaggtgtgagccactgtgcccggccgacatacactgatctgccaccctcatgcctcgtatctgtgctaagcagctaggaaagttaaaaaaaaaaaaaaaaaaaaactttgtgcccttttacagtaactgattcatcctagatacctagtacttttctcaatatttacataaaatgtttacttccctttttaacataagttcccataattgaagaagcaatggccaccaccattgtgtcaggtacaatgcagaccccttcaggcaaatcagctcctttaatccttaccacgggcaaggcaggcaggatccccatcctacagatgtggtccgaggtgtctgacaggcagagctgggattcacacacagcactcacggctaccagagcacacaagccttgccaccaagccacgctgccttgaatcgataacaactatgcttaaatcaaacaaaaggagctggaggaaccaaatgcgtgacaatccatcctcaccaggttcactcagttccatctgcgagcacaggaatacctgcccaccagtgaggtctgccggtgccaagccctgcactaagggtttcctaaactctacctcaacgcacgatgccactcaccctacactgcctgagcacctcctactcctgctctcagggcgctcgtcttcagaagagggcagggaggaaaaccatcaccatctccctgaatgggcaggcaagccactggcagcactcgggttggctggagggggcttgccagttaaggggacaggagagaaataactcagtcggaacaattttctgaatatttgaaggaaaaaaataaggtgagctccctctcacatcctattacaaaataaatttcaaatagaaactgtaaatagatagtatttttaaatggaacaaaaatatccacagaaatattttaaaatttaataaccttttatagttttggggtgggaatgctctttctgggattacaggcatgagccaccgtgcccggccctctttcttagaaccaaaaagaggttgcaaaaggatgatttttggctgggtgtggtgtctaacacctgtaatctcagcactttgggaggccggggcaggtggatcacttgaggccacaagttcgagactagcctgggaaacatggcaaaatcccatctgtacaaaaaaaaataaaaaataaaaataaatagaaaattagccagtcatggtggcatgcctctgtagtcccagctactcgggggtgctgagatgggaggatcacttgagcctggggaggtcaaggctgcagtgatccgagatcacacctctgccctccagcctggctgacacagtgagaacccgtctcgacggaaagaaaaaaactgtgtgtgtgtgtgtgtgtgtgtgtgtgtatttctctaattgcatgacaaactgggaaatttttatgacatcataaatacacaaacctaaaggtataaacgtacatatacagagtttatataaactaatgaaatcaaaaactccaacaggaaatggtgagggatatgactggatagtgcatgagaaaaaatggccactcccatccatgtggggagatttcaagcttgtttcagaaggcttttaaaattacaagccttttgatctggtaactcaacacctaggcatttgtcctaaggaaatacccaggcgtctacacacgaaaagactgagaaggactgaaaggtccatcaggagaaaatgggttaaatgaactgtgaggacagttcagtgacactgcttctccattgatcacacggcaagagctccatgtacttgtaagtgggaaaaagcttcagaatggtgtttgatgcaatcccatctgtcctatattatgcacacatacacatttggggtatgaaagggaaaacttaaggaagaattataaaacaaaatatttatcgtgattattcctgagtggtcaagctatagtctttccactcttctctatgcttctatttattcgttttatatcttattttatttattattttatcttatgagacagaatctcactctgttgccgaagctgaagtgcagtggtgcgatcatagggctcaagtgatcctcctgtcccagcctcccaaatagctgggactacaggcgtgtgccatcatgccaggctatatatataatatatatatatattatatatatattatttatatgccaggctatatatattatatatatagcctggcatataaaatatatataattatatataaatattatattatataatatgtaaatgttatatattatatataattgtatatacaattatattatatacaattgtatatacaattatattatatacaattgtatatattatatttatattatatacaattgtatatattatatttatattatatacaattgtatattatataatatataattatatatattatgtattatataatatatattatgtatataaattatataatatatattttatatataatatatataaattatatatattatataatatatatattatatatatatacacacacacacatacacacatattatagagatggagccctcctgtgttgtccagactggtctcaaactcttgggttcaagcgatcctcctgcctcggcctcccaaagtgttgggattacagcgtgagccactgcacatggcctgtgcttctgtattttttaagtaggtttattatatttgttatttaaaactaaattatttttaaaaaatgaacaaactctgggagaaggatgaatattggatacatcattctatttttctctgatatatccctaagttaaagaaaacagaagctggctgggtgtggtggctcatgccctgtaatcccagcattttgggaggccaaggcgggtagaccatctgaggtcgggagttcgagaccagcctgaccaacatggtgaaaccccgtctctactaaaaatacaaaattagccgggcacggtggcgcatgcctgtaattccagctactcgggaggctgagatgggataatcacctgaaccctggaggcggaggttgcagtgagctgagatggcaccattgcactccagcctgggcaacaagagcaaaactccatctcaaacaaacaaaaaagcaaaatagaagcttaagatgtaagcacagatagtcattatgccatttaacagatgcccagagagatttaaaaagtacccaatgcaagatctgcagtgagcccattttcccagcgtagtctcacagatgaacaaagtggcatctacaggtgaggcagcacgtccgggtcacctgcaggctgggaggagtcggtggagcagcaggggagaggcaagtggccggggtgggggacgggcccacgtcatcgcatggctgctgtgtcgtcgtgaccgctgtctcatcctgcgagacacaaccctgtccgggagaactcccctggtgcccaccagcccagggggacctgcctgagggtgccagccagccaaggtgcagacaggcaccctggccccagagtgcgtcccactgttctgcaccgttgctggtgaacatgttgtttgaaatagaagactaaagccacaaaatgggttttacgtcatggttaaagggaactcacagaggaactgtatagaagaaaaaaaaactcagcagaagagctgtttcgttcatttataaccacgcccctgcactgtgtcccagctctggcagggacgttccctccctcttcacacttgctgggctgaatcatctgcagaggtggcaggaaaaccgcctcatttacatacaccctttccggcaagcacagccagggattccaattcccagagcctcccagcctctccagtgccaacgcagcgcagcacggatgcagggcagcgtgggcagcggtggcataaggtgctcacacccagctggagttgaagtctggctgacattactttctctgactccgtttctggcagcagccacggacaccgatgggggctgggtggcccccccacccccccccccccgccccaggcctccctgcctgagtgaggggccctttcctgggggatggcctcctggcttcaagcctgaatcttgaggatggaaggagaaataaatgagcattcagaaatctcaggctcactcctgtcagcttcagcctcactcctgtcagcttcagcctgatctacaggattagcttctgaggcctaattttaagagaaaaggaatcaagaaaaaaaaaaaagacatcaaaaatgaaaaactgccatctgagttccgtcccacagggttataacacatcttagcctttctgcctgtcttgaaaagaataaatgtctatttttatcagcgaggcagcaaaatccatcaacatctcctgctcatctgctgaaacgcacacgcctgttccactcatcaccgggctgttgcgtcatctgccacctgggaggaccaagagatgaccctgcccaccaggggcctcacagtagatgccagtgccagtgccagcagatgcttggcggggccccatgctgggctgtagggcgcacagctctcctttctaggtgccaggtcgaacactgagcttactattgtacaagatctaacccaggagggtgagaaaggaggagatgaggcaggacagcaagagggactggggtcccacacagcagctcagccactgccgacctcggggtcaggaaacagacacccacaagagcgtccacgacccgtatgggaagatgtctgaaccccgagacggcgtgttctgtgctggagaacaacttccagggctttatccaggtgttctaaagccacagcaccaaaaagaattctcttcggcaaaggcagcaggactcaacaggaagcagacgtttgcgttccgttacttgaggaaaaccaaatgctgctgacatttctacccagagagagtttgcatctctcctgcttcgcagccatctttcctacggttttaccaggagaatgcctagctcttctccaacctgtgccaggcctgacactcagctcctctgggagtgcctccatttccctgtgcgtacaagcccacggtgccgtaggatcaccggtccactctgcgcggcagcaccgcaccccggagccgcagctcttcctcccgcttgcccgacagccctggtgccaagccctgtctgagccccaccaggaggaagcgcgtgctggctgctctccatctgctctgggactctggcctgctgcttcctctgcctgccactccccaaccccgtttcctcctctgaaaactggagctacacctgccccaacagggcagaattaccttaaatggcacaagacaattgtacagcagacccacctcttctccaaagttttcagggcccaaacccagacacctccttgcaggactcatggctaccgtgggctcgcaccaccagcctccccatgcgttttcctgcctctgcttttgctcaatctgctcaatgacagaaacgcgacaacagaggccactttctccaaacccagctctccctcgaggctcccatcctgctgctcacgctgaggccactctaccctgccctccgcagctcacaggcagacctggagcccagtgactacagggttggcctcctcatcttgccaccactcacaatgcccagcagtgttaaaatccggcaggatgcacccgcttgggaagcagtccccaaagcagaatcgtcaccacatctgaatagtttctgccatcccactgacaggccagcatctaaaagagatgtgcgctgagcgtccgttatgtggtggcgtcgctgtggtttcttaaccagaacgcaaaatcctgtgaccaggattatcaccggctcgtttcatacatgagacgggggaagccaaagtaaccactcaggccacagcagaaaaacgcgtgctggaatctgaaacaaagtctgttggattccaagggttcaacgtcttttgtgatgatgaagacgaagcctgcccaagagcagtcagagctgaaagaagaaaagcaggagggcctgtgaatgcccccaaccccctaaaacctgcagctccaggtccgacactcccaggtttgcgttttgaatttacactacctatggggtccaggccatcacctaagtgagaaatttcacacgctcacccggggtgctcaaagccatctctctaaatgaggtgcctgatgtgcagacaacccttatatgatctacatctcttcacctgtctggaaatcaagaccctctcacgatttttttgtttgtttttccccgagacaaggttctcagtctgtccccaggctagagtacaggggcgcaatctcggctcactgcaacctctgccttccgggttcaagcgatcctcctgcctcggcctccagaatagctgggattacaggcacccaccatcacacctggctgatttttgtatttttcgcagagatggggtttcaccgtgttggccaagctggtcttgaaatcctgacctcaagtgatctggatctctcagcctcccaaagtgctgggattacaggcatgagccactgtgccctgccctctcatgatttaaaaggcaaatggacacaaagacacatgcagacgacgtgacagcctctgtgaagatgagacgccttggcaggcacactgttagagccagaaagaatccagccagcttgctgaaccacaatgcattcctatgtgtgagcaacgattagaaaagttattttttacaaagatgtcatttacaaacaacaaaagctgtaaggcacaaaagtgggacatgtatgaagtctactcgaaagatgtgtcctttaattactcctgcacttggcgaggcctctgcttcccagccttgtgttaactgtggcctctgttcagactcctgcagcacacggaggagtcagcgtcatggggtctacagatccaaaacacaggccgggcgcggtggctcacgcctgtaatcccagcattttgggaagccgaggcgggcagatcacctgaggtcgggagttcgagaccagcctgaccaacatggagaaacaccatctctactacaaatacaaaattagccgggcgtggtggcgcatgcctgtaatcccagctacttgggaggctgaggcaggagaattgcttgaacctgggaggcagtggttgcagtgagccgagattgcaccactgcactccagtctgggcaacaagagcgaaactccgtgtcaaaaaaaaaaaaaaatccaaaacacgctctctgttttcccattcggaggagaattacatccttctggaaagaggcctccatgtctgctggcgccacgtccgtcctatgtcccctctctctgctctgcctccttcaaaccccagtgagtgggtcaccaagaccccgtaggattgacggggaggtggaggttgcagtgagccgagatcacaccactgcacaccagcctgggcaacagagtgaggctccgtctcaaaaaaaaaaaacccgaattcgaattgtgtctaaatctgtccacttcacctccaccatttgtgtgcaggccacagccatcatcttctcccagctggatcacttcacagtgcctaccagggccccctgtgtccacacagcagccagagataccaggaagggcgactgggtcatccctccactctcaagttccccagtggcatctcatctgcacctggagacagccaggttcccacgggttccgaggctgtccggccacaaggcacccaatgcgctcctgccccagggcctttgcacttcctgtctactctttcctcaaatccctgcggtttgctcacccactcacctccttcaggtctttgttcaatgtcacctccttagagactgctgactggcttgttaaaaacggtgcatgcccccagcagccccagcacccccccgccgctgtgctcgcctcaacagcgcttgccacctggcacactacatctccagtactccctgcactaggcacaccccaaagagaaatgtctctgtttctgcccccctggtctaccccagggcttagaatcatgcctggcaagtgctaggctgatggatgtgaaccatatggtgaatggtctccaggtaggttctgattttccctttgctccgcaaccatggcagtctgggctgtctgccccagcctggttgcttctttttctggagcaacagagcatgtgtctgccagctagagtcatctcttggtgtttgcctagaacctgaacacatcctcctatctaccttgtatcagctctagattacttataatacctaaaacaaacactatgtaaatagttattatactgtactttaaaattttagaatattttttattgcttttctccccccaaatattttctacccctaggttaaggcaccctgctttggtgggtttacgtgataggcaggtcagcggcgggccagcacacagaaacctcacagcctcctcctccacggtctttcccctttgggttgaagatgccctgcagcctgaatccctgaatagctgcatggagcagagcagctaagcccacacagccctggaaatttacatgaaggaaaaataagcttctacagggcttggattcctccaagaaccactgcgtttgcatgtatttgttttaagaacttcatccatcgcaatgagcacatccctctctccctagtcactatgttttccacatgaacacatgagggtccttattttttaacagagtagaatagatgttaaaaataaatatcatgaagggaaaatttagcctctattgatgttatctcttctgtgacattttcctactgcatatcaaaatatccccagcctacatagctataaggtcatgttggcaacactgtcattataaagggaaaaaactgtcctctccccagtgatatatttagaaatccagcatttcgactcagcatttccttaggtataagaatactcccacatttatcttaaattacaatcactgtacattgtgaaaagaagtactgttccaatgttaataaaacagtaaactgtacatcacggtggcgttagaaaaccgtcagaacagactccgtgaaataagctttagctttaagtaaaatctccctgtaagcttcagcaggcttctgcagcccatccctgtggctcaggctaattcaattgcatggagattcaactttaattccccgcacttggaatgaatacagctccctgagggatacttaaaagcaaatttaacaaatgacagaaatcagaaaatttctccaatttgtccaaccagctatttgaaatgtcaattctaaacactggcatcctggagaggtaccatttttttcctagtcagaataattaattaggagtaaattgctgaaaatcaagcagacaaaatatccaggagtgtttgcttctttgatcaatttccttcctgaagagagacgagctcacagtttaaaacaaatcgaaatggtattctacttcctcagaggactgaagaaaagttaacgacgatgcctgcacgcattttggatcacaggccgtgccacgtgcagtgttctggccgcatcttttatatgacataattatggatttctttctattatttgctatccgaaaggcaggcctgctgctggccccaacttcagagaccagcccagaattggtgggagcctcggatggtgcgggttgactcaggcccccacggcggcgtggcggagattaaagatggggtctaatctggccctgtggacccggctcagcagacgatggaatcccagatctcatcgggaagtctgtcagccaaaaacacacacctcaaagcggagtgcgtggtgcctccacaccgggctgtgtttgcggagctgggatgataagtgtgcaagggaggagggatccagggccaggttgttttcttcttgttaaaattcagataaatttaccaccgtagccattttccagtgcacactgaggtggcctttcgcacatccacactgttgtgtaaccaacacaaccacccaattcctgggcaccttcgtcacccccaaaagaagccacgtgcccgctaagccatcacaccccgtttcctccaaagcccaggccttggcacacgcacctgcattctgtctcaatggctctgcctgttctagacatttccagaggtggagccacgcacgtgaccctctgtgcctggcccccctcatgtggcatgctgtccttgaggctcatccgcgctgcagctgtgtctgagctccactggggccggatttaacagactccctcaagaggggcttgctccagccccacgctgctgtggcggactgggctgggggcctccttgtgtcttcaccctccaccctgcaactgtgcggcctcttccacagactccacatcagccatgtgccttgcctggcaaatggcacaggcatgactgttccgcatccctcagggcttgcaaaggtgccagctgcttctgctgtgccctctgctgggactcctgcctcccggggatgagctgcccctccctcagggtgaaggagctgcatggagtggtcccatcatccaggcccatgaaaggccctagccaaggtggccgagaggctaagttggcctctgaccagatgtccctctgggtcatgcagccccagcagccccggaggctcagacacagtacgaaatgctgctgtaggccacaagaccttgaggcgcaccagggaaacgacgcgatggagcagatatattctcaaactcatcagaatgagtgcagcgtgctgtgtactgtcggaaagttagaagcaccacgctggtctctgctcagtggcacctttcatctagctgggagttcatgttcaagaacttgaaaattacataagcgaaaatgcttaggtatgttgaaattaacggctaattatgtgtatacaaataccgattcaaacacagcaacaataaaaaggcatttttggctgggcgcggtggctcacgcctgtaatcccagcactttgggaggcagagatgggtggatcatgaggtcaggagttcaagaccagcctggccaacatggtgaaacctcatctctactaaaaatacaaaaattaggccgggtgcggtggctcatgcctgtcattccagcactttgtgaggccgagatgggtgtatcatgaggtcaggagatagagaccatactggccaacacggtgaaaccccgtctctactaaaaatacaaaaaagttagccgggcgtggtggcgggtgcctgtagtcccagctacatggggggctgaggcaggagaatggagtgaacctgggaggtggagcttgcagtgagccgaggtcgcgccactgcactccagcctgggcgacagagcgagactccatctcaaaaaaaaaaaaggcattttcaagacaactgggaaaacccgtgactgtatttggtgccatcaaggaatggccatttatcatgggtcatggaactgtgattcagttttttaaaagactcctcatctttcagagacatacacttaagtatctctgcataaacgtgcactatgtgggatttgcttcaaaatattcaggtaaggaaataagactggctatggcggatacgttagactttctttcctttcatacatatttgaaaaaaaatacaagttttttttcttctttttgaggtggggtcttcctctcttactgaagctggaatgcagtgtacaatctcagctgcctgcaacttccgcctcccgggctcaagcaatcttcccacctcagcctcctgagtagctaggagcacaggtgtgcaccaccatgcccggctaatttttttgtattttcggtagagacagggtttcaccatgttgcccaggctggacttgaactcctgagcttaagcaatctgcctgcgtcagcttcccaacgtgccgcgattacaggtgtgagccaatgcacccgcccttaaaagtattttctaaagcttaaaaaaaatatcagcaaatgaaggaatgaccaaagtgaaatgggataacccagcctgggctgaacacagacgggggtgcagggctctggggtagggaggacgcacggggataccaggccaggtgtgtctgaggctgcgcaaggccaccactgctgtcttctaggggagggtctgcagctctcgcaggggtgcccagcggtaggtcagaagccatgctgggacccagctgatgaagaccccacccgctggtccaggggtagctctagttcccagccattgctcttgactataaacttggacaagaaaaggaatgatgacaagtggctgatgaagctaaattaagggcactctgcaggaagggaggagaaagctacaaacctgctcagaggcttccgaactggcccaggggccaggtgagaatgggactgtaacagctgctgtgcaggaaaattgcccggtgggatgaagcttagcaaatggacaagtcagttagtacctgcaaaatgaagcacggtgtcaaaaaccgctttattttccgcactctgctcaatattccatgccttcgaggctccaaatatactcaacatgaccagtgctatcaacaaattatgcagactaagttgctttttcgtaattataaatcaatcatgctcacagtaaaatatttgcaacttagaaaggtctactataagtaaggtaagattttttccataattaaatatgccaagaaataccactgaagtatatccttccagggcatcgatgacattttaatttgtctgaagaaaccaagtaggttctgatgcctaaggaggggacccagggagatgcctccacccatttccagcgcaggaagaacttgcaggcaggagcatggaggccccacctactgcgagagcaagcgaggagcatgcagttcacttaacactgttggcagttcttggaaacagcaagtttaagtgacatgatgtttaacaaatccatttttttcctaatcaacatcataacaaaacaacattattcaagaacctgatgtactttgttttgcttaaaaacgcagtttccaagaacctctccacagcattaaggactcactaaacattctccaaaagttgatgccttcagcacaatgtgaaaagaacagccaaactaagcctatacattctgacaaagttacacacaaagttatcatcttggcaaggcttggaagcgtagcaaattaaaaattctataattggctgggcgcggtggctcatgcctgtaatcccaacactttgggaggccgaggtgggcagatcacccgaggtcaggagttggagaccagcctgaccaacatggcaaaaccccgtctctactaaaaatacaaaaattagccggtcgtggtggcgtgtgcctgtattcctagctccttgggaggctgagacaggagaattgcttgaacctgggagacggaggttgtggtgagccgagatcacaccactgtactccagcctgggtgacagagcaagactgcctcaaaataataataataataaattctataatttaaggccaggcatggtggctcacgcctgtaatctcagcactttgggaggccgaggtgggtggatcacctgaggtcgggagttggagaccagcctgaccaacatggagaaaccccgtctctactaaaaatacgaaattagctgggcgtggtggtgcatgcttgtaaccgcagctactcaggaggctgaggcaggagaatcgcttgaagccaggaggcggaggttgcagtgacccgagatcatgtcattgcactccaacctgggcaacaagagtgaaactccatttaaaaaaaaaaaattctataatttaaaaatgagccagttgcaatggtgtccacatgaagtcccagctactcaggaggctgaggcaggaggactgcctgaatccaagaatttgaggctgtagtgtgctatgactgtacctgtgaatagcttctgcactccagctgggcaacctagtgagaccccgtctcacccccacctcttaaagaaaaattatatatatatatatatatatatatatatatatatatatatatatatatatatatatacacacacacacacgtatggaaaaaaacaaatgtcactgacgaatggataaaaatgtgttctatcaggacagtggaatattacacacccatgaaaaggaatggggcactggcacctgctatgacatggatgaacctttagagcattgttaggcgaaagaagccagacacaaaagtccgcatgtataacctcaggaacatgcaacatccagaacaggccattctgtggagatggagcacagagtggtggctgccagggggtgggagggggccataggaagcagctgctcatggagcacagggcttctgttccaggcgatggaaacgtctggacctagatggagtgatgcgcgcccaacatcatgatggacttaacgcagttgagttatgtactttaaaccggtccgttttgttccgcatattttacaaacatatggaagatctaatcaataatcaatgaatctgctcagcactgagctcctttatgctccccctggaggaactgataccttcccctgtggcctttggtgaagaacacattgaatgaatgaattctcagcaacaacaggttctttagatctttaaccgccactcctaaacacagagtggtgatatgggcttgtgagctctgtctggagaaaccaaagctgttgttttcagacattagcatgagacaggcagagataacctgtcggaggtggatgttacacttggcactttttacgctgccattctgccttctctcccctccagcacgctccggtctcctgtcacatccccagggcaggcagcaaatctgcagagctctggcagcgcagtggccactttccctggtctccttctctgtgcaaatcaccacagtcccaaggacatcagccacgtcaccctctactgttttctccacaattgtccgtggagagcccaacagacaggtctgcagctcctctgcttcgccggccccatgccccctcccagcgctattcagggccctgagctgcccgcagccggcaggcaggcgtcaagcaagcagggaccggggcggggacctgagcagacaccgtggacggagcaggtccaggctgagggaaggtcatggctggcagcaccgcatgccacctgggcgggcaccagccaggacaatccacggggaagtgccattccccaacctccactgcgcaggccaagcacctgcagtttggggccactgatccagcaccccttaaacgtcctgcatcagacgaaagcagtgaggggtgtccctgcgagacctattactttccagctgctccagggcagcaagggtcatagaacagcatcctggtaatgtctggatacctgaatcagccccgcggggtgatggggtaccccttgcaagaatctgcaactgtgtaggggcccatggtgaggtcctgctcctcccacataggccacaggccctccccacccactgcctcagttccaccggtgggtcactgcctccccaggcctaacacccatgggaccccgaaaaatgtctgcagatctggtaagcatctcttggaggctcagctgtgccaggggcctcagcgggggagcaggatgccgcctcagggcctcccagcccttccctgggggccacgggcttgtgtacatcaccagaagggaaaggaaaagccagcgtgagccaagtgctgagcggctgcagagaggactgcgggatcctcagctatttggcaaagttccataagaaacccgttttgagccaatcttggaaagaaggaatttccacgagcagaaacggggaacctaggatgggcatcacacccggcagagcggtgggcgggcagtggcctgccgggtggcctgcggagatcacaggggctccagcccacgcttgggggtcagcctgtatggtctaaacagctggcaaccttgagactctgcaagtaggagtgtggccacagcaggtcggcacggcggcccgcccatcaccccgtgcactgctcccgcaccggcctcgtcatcaattcttcctctgctacagctgcggcctcactccctcaggaatctgccatctcaatgaggcctccctaacaccccaactgcacacaccctgcacttcctcctgagtctgtctgcccatcccatccccccagtcataagctccctgaggacaggaatggtctgttttggttgctgctttctcttcagcatctagaagaaggcccagcacagagcaggtgctcaagacatcaactgtacaaacaactgaatgactgcccggaaaaagacaaaagacagactacaacagccaggcacgggggctcacacctgtaatcccggcacagaaaaagacagactacaatggccaggcacgggggctcacacctgtaatcccggcacggaaaaagactacatcgaccaggcatgggggctcacacctataatcccagcacggtgggagcccaaggcaggatgatggtttgagcctgggaattcaaaaccagcctgggaaatacagcaagaccttgactctaaaaaaaaaaaaaaaaaaaaaaaaagaaaagccaggtatggtggtgcacacccgtaatcccagctacttgagaggctgaggcaggaggattgcttgagccagggatgttgaggctgcagtgggctatgatcagccactgcactccagcctgggtgacagagcgagatcctgtctcaagaaacaaaaacaaacacccccaaaaccaaaaaccaaagacagacggcaaagacaagagatcaggaaagggaggaacacaatcttggctcactgcaacctctgcttcccgggctcaagcacttctgcctcagcctcccgagtagctgggattacaggtgcccaccaccatgcccagctaattgtttgtattttcagtagagatggggtttcaccatgttgaccaggctggtattgaactcctgacctcaggtgatccacccacctcagcctcccaaagtgctgggattacaggcgtgggccaccgtgcctggccagaggctttcttaataacggaataacttaaaaacttctccacaaaaagcacaaagagaattccaaccctccgaagacagcgctcctgaaagcggcctattttcaccatgagcagggagcccggctcccatacccacagcccaaaagagaacacgggcccagcctaggctggttcctgaaggcgacaggcccctgggccccactgtctctgcaccagaggggttgggagcccctgtcctgcccatggccaacccccccatatgctcaaagcaacagtccatccaaagactttgaaaaaaacacacagtcccccaaatctctcacagactcagccaggcggccactccatgcagatgagattttagattccaaatcagatgctcttcttgggtggttttattcaaacatgtgtgtaaatcatgatacaatttaattaaagtggaacatctctccgaaacactctgggattaagtagacacgcgcgcatgcagatcattcgagagttaaacagaacaggagttaggagtcttctgacttagcggttctctaagtgtggtccggggagcttcagggaggtccccagggccagagcggcttgtgttttccctgtgctgacatttgctccggtggctaaggtgaaactgcaggtgcatctgcacagtgcaaggcggcgatggcaggcagtaccctcagacgctggactcaccaccacagcacgtgcacagcacggggacgaagccagcctaccttaaaactcctgcagaaagcagcaaaaagcatcaagtttattccacattgactcttaagcctttgttttttttttttcttgatatggagactcgctctgttgcccaggctggagtacagtggcacgatctcaattcactgcaacctctgcctcccaggttgaagcgattctcctccctcagcctcccaagtagctgggattacaggcgcccaccaccacaccgggctaatttttgtatttttagtagagacgaggtttcaccatgttggccaggctggtctcaaactcctgacctcaggtgatccgcccacctcggcctcccaaagtgctgggattacaggcgtgagccactgtgcctggccgtgcctggtctcttaagccttttgaatgttctgtatgaggaagtggggggtgcacatacccacatacccctaagtgtgaggctaccccaaggagaggcacttgagtgtggcctttcgagctgtgacctcgagtagggtgccgggcagatgtcttctccaagcagacctagtgacctgcacttcaaagaaaatggctgatggtgtctgttgcaatcgtaaaattcaagctttaacataaaaattataatcgtggaaaacatattcaccaccatgagcttcaagcttccaaatacttaaaagacttctggtgagttcgaccgggcgcggtggctcacgcctgtaatcccagcactttgggaggccgaggcgggcgatcacgaggtcaggagatcgagaccatcctggctaacacggtgaaaccccgtctctactaaaaatacaaaaaattagccgggagcagtggcgggcgcctgtcgtcccagctactcgggaggctgaggcaggagaatcgcttgaacctgagaggcggaggttgcagtgagctgagattgtgccactgcactccggcctggccaagagcgagactctgtctcaaaaaaaaaaaaaaaaaaaaaaaaaaaaaaaaaaaaaaagacttctggttagttcagcagtgttcgtgaatgggatgttttgatgatctgtgtgattaaatgtgtcactgctggaaggcccgtgtaactctgtgagctagtgtgttccaaatgcctggtgcatgatggacaaaacacatgggagacaggatccattcgggctgcagttctacagctgcggattctacactgcacctgactttcaagaaactattgctttttctggctgggtgtggtggctcacgcctgtaatctcagcactttgggaggctgaggtaggtggatcacacgaggagtttgagaccagcttggccaacatggtgaaaccccatctctgctataaatataaaattagccgggtgtggtggctgtaatcccagctactcggaggttgaggcaggagaatcgcttgaacccaggaggcggaggttgcagtgagccgagactgcgccactgcactccagcctgggcaacaagacccaaaaaactcggtctcaaaaaaaacaaaatgaaactactgtttttcgagttttggtgtagtagcaacaaatacccataattatctgaaaaggctacaacaacaaccctcccttccagctacatagctgcatgaggccagatttttttttttatacttcaaccaaaacaacatatccctggccaggcatggtggctcgcgtctttaatcccagcactttgggaggccgaggtgggcagatcacgaggtcaggagatcgacaccatcctggctaacacggtgaaaccccgtctccactaaaaatacaaaataattagccaggtgtggtggcagacgcccgtagtcccagctactcgggaggctgaggcaggagaatggcgtgaacccgggaggcggagcttgcagtgagccgagatagcgccactgcactccagcctgggcgacagagcaagactccgtctcaaaaaacaacagcaacaaaaaacaaaaaaaccccaacatatccctgtcgacagaatgcagaagccagctgatgctttctattaaggcagaccttaaggagatttaggaaaaatgtaaaactacgccactcttctcattatattttgttttagaagaaattatctttcataaaaacatttatatgaatacatatttaatataatgacatgttgttgtatcaaatgttttttaaactcctgttttaatttgtaatacaacagatataacccacataaacaaatggtcttcggggttctcaataacttaagaatgtaaagaggtcccaaccaaaaacagctgaagagctgccgtctgaatgtccctttccaggagtggattgtcatctagagtattttcttaaaaacacagcagccctgcctgaggtttcttcaggaataacggtaatactggcagaatcggcgacaaatggaactctatccacaagaccactgcagaaattcgggtctggtttctatcacactataaagaacagctggccaggcatggtagctcacacctataatcccagcacttagggaagccgaggcaggagggtcacttgacccctggggcttgagaccagcctgggcaacacagagagacctcgtctccacaacaaaaatttttaaagtagccggatgtagtggtgcatgcctgtgatcccagctactcaggaggctgaagtgagatcgcttgagtgcaggaggttgaaactgcagtgaaccatgatcatccccaacgcactccagcctgggcaacagagcaagaccctgtctcaaaaaaaaaaaaaaaaaaaaaaaaaggccagacacggtggctcacgcctgtaattccagcactttgggaggccaaggcgggcggatcatctctcaggtcaggagttcaagaccatcctggctaacatggtgaaaccctgtctctactaaaaatacaaaattaactgggcgtggcgtgtgcttgtagtagtcccagctactcgggaggcagaggcaggagaactgcttgaaaccgggaggtagaggttgcagtgagccgagatcgtgccactgcactccagcctaggagacagagtgagactccgtctcaaaacaaaacaaaagcaaaggcaggactcaagtcaatattcatttattcaaaacagtgtcctaagaaaaacacattaaaccaattctttaatgaaaacactgggaaatccaaacccactaaattctgagccaatcttttcctttgattccctaatgaagtttgctctatttcagagaggtcccctaaaagtcctgcacgtttgcataattatggcaaaggaatgcaagctactctcctcatgtcttcagcaacctgttgcagtgacaatgcagcccacactctactaaggcgtccttccgggcctggggtccaacaaccagaccaggagccacacgagtcaaggttctagaacctggaggcaccaccaggtctgaatccaggatccagtacttactgctgcgtgacctgaacccctctgtgccccagtctcctcacttccaaaacgggaggatggcaggacccacagagtcatgaccgcctaaagccctttgcaagcacctggcactcagcattcgccgtgccctcggtaactgctgctgctgctgttactgaagtcatgagaactcactctaaccgctcaagtcactcctggagcctcagacttcatctgtgtgactcttggtaacatcttttcatcacatacaagcctgggaccactccctgccaacaccaccattcacatattcattatccacagcacaattccactaactgttttatgagtcctgatttgccaaacacagcatttaaaacgttccacttttgaaataaacaaaagcaggctggtgcagtgactcatgtctgtaatcccggcactttgggaggctgagatgggaggatcccttgtgcccaggaagtcaaggctgcagtgagccgagatcgtgccactccactccagcccaggcaacagagtaagatcctgtctcaaaataaaatattataaacaaagcaaaccaaaataaaataaacaaaaatggagtgaaataatggagacagccccctggccaggcctgtaagactcagcgccgaaggcccagagcagacatagtcagcacccactccttgcccacctgctctaggccccgggcccccaggcggcccttctcatgccacagtggccccggcccaggcagtgttctcgcccggcacacagcccgctcagagccctctgaagggtggcaggctcgtgagttcaaagccacagaaccagcatgaagtggggcctgccccaccgcctggccaggagctgacacttcagggacagaatagaagtggctgacatcaggtaggaaatggtggcttctgtccactacagccgatgtttagggggcagccacagttaaatgaaacttttaccacgctcaaggtggttttgcttttcggaaccggaccaccctcttgcttgctcatgcctgtggcagctctccacgcggcttcgccacagatcctgcccacggtctgttctgaattaaacacactattgagttggagcactcatgtgtttgctctgtctctctggggctttgtttagaaaacaaactttgacaatatccaagcaaacaatgggaccaaatacctgcaaagtcacttaaaagaacaaaagatatctgttcccattctgagggcattttgtaagaaacatgctttctgatatcattcatctgaatcaatgcgtaccctgtcatcagcgagccctaagccaacaggctcaccctcagagcatgtgccttcctcagaacaaggtttgcactgagtcttccacattcttgtacaagaacccttgtaaccaagcccgtgaggctcccacaccccatagtctgtgccagacgagactcctcagggaaccctaaccgccatcccatctgtaccctgctttatccaggcagcaccagcacaaacttactgaagcatcattttgagattcctacaggagaggctcactcctcaaaggaccgatgacagccccgccacccacttacacagccattatcgcaacagcgagccgcaggcaccaacggcttcctatgcacaaggaagatttgccatgcattaattcacttcactcccacagtgtaatcccgttactaattatgacaacgacaacaattattaactctagtaactattatgtaattaacacaatcacttattgataataattgcaatgaattataatcaacaattgctcataactaaattataataaaatacaatgcattatggtcatattctgatggttatgatacataatttcatattagcacatgggtattatttataagaattaatgatggcaatcactattattatcccattttacagaggaggagctgacacaggggcagcagcagtgggcagggcctgggtgggagtccagggcctcggtgccagagcccctagaactgcccaataccaggctcacagaacaggagagcctcagggggagagagctcactgcccccacctcactcggccttggggtacagcctccacccagcaggggctgagcacaggtggatttacaaggaacatctgtaagtggccctcaggaaagagacacacatcagcactgactgcgtccagcggagccctgcgtgttttcaccaggcagcctgtccatccctggccccgctctccacccccgcgcaccctccaccaaatgcttcctgcagctctgctctctgcaagcaacgatgctggatcggagatgcagcaggagcaggtccagcctctggcagtgagagagtggacccccctcatccccacacaccttgtcagaccctgtaaggaagcactctgaaaaagagggtgttctaagcatatatgtaagagaaacaacaacaacacaactagcagctaacgcgagcacctgctgtacaccaggctctcgggcgcattgacctgttcaatctcagtgaccctgtgagagaagcaccactctttttttttttcgagatggagtctcgctctgtcgcccaggctggggtgcagatctcagctcacttcaacctccacctccagggtttaagtgaccctcctgcctcagcctcctgaatagctgggactacaggcaactgccaccatgcccagctatttttttgtatttttagtagagacggggtttcaccatgttggccaggctggtcttgaactcctgacctcaagtgatccacctgcctcagcctcccaaagtgctgggattacagacgtaagccactgcgcctggccgagaaacaccactcttatgcccaaatgaagagttttgatgacaccaatgtcggtcacgcagctggtaggtggaggataatcaagaactgagcacagccacccgtgggcgtgaccctgtcccacaggagcccaccctctgatctgtgtgctgccatcatccttttactttaaaaattgttggatgctgggcatggtggctcaggcctgtgatcccagcactttaggaagctgaggtggcaggactgcttgagcccaggcgtttgagagcagcctggacaacatagtgagaccctgtctctactaaaaaataaaaaagccaggtgtggtggcacacacctgtagtcccagctactcaagaggtggcaggattgctcgagcctgggaggttgaggctgctgtgagccgtgattgcaccactgcactccagcctgggcaacagagtgagaccgtctacaaaaaaaaaaagttgggccaggcatggtggctcacgcctgtaatcccagcactttgggaggcctagacgggcagatcacgaggtcaggagttcgagaccagcctggccaacacggtgaaaccctgccaacacggtgaaaccccgtctctactaaaaataaaaaattagcctggcacagtggtgggcgcctgtaatcccagctacttgggaggctaaggcaggagaatcgcttgaacccaggtggcagaggttgcagtgagccgagatcgtgccactgcactctagcctaggcaacagagcaagactccgtctcaggaaaaaaaaaaaaaaaagttggccaagggtaatggctcacacgtataatctcagcactttgggaggccaaggcaggagaaacacttgaattcaggaagttgaggctacagttagctgtgactgtgccactgcactccagcctgggtgacaaagcaagaccttaaaaaacccagaactattgtaaatatacaaatatgcttcccccaaattaacagcactcagaactgctgaagacattaagtgaaaaggaaagacagaaaatcataaatgtggctgatcccaactgtccacccatgtatagaaatgtgtgagcctgggcaacatggtgaaaacccgtctctacaaaaaacacaaaaaatcagccagggtggcggggtgcacctgcagtcccagctacctgggaggctgaggtgggagggtctcctgaggccaaggctgcagtgagccgtgattgtattactgcactccagcctgggtgagtgagaccttgtctcaaaaaaaaaagaaaagaaaagaaaacatatttcttgtgagtaatattacaggtggttttttttttctttttacttccacatctcctaaactatttgaaatgagcatgtctttctttttatcatgatggaaagaacagtttttttaaaaactagaatcaaaaagcaactctgcccaaggaaaattctgcatggaaaccccacggcggcatgatggggaggggtcagggcggctcctccgagagcagctgctggctccttatcctggtggcagccgcggccttatctctgtgatgcagacagaggctgccatggaaggaggaggcccctggccctgggctgcccacacagtgtatacaagacacagccacccgcacctggcagccactgtcgccaagtcgctagggatgggctgtggcgcaggctcgggagcaagtctaatattcacgggcaacaccaggaacagctccctaacaggcactgtaagtacaccaccaacaacgacctcactttccactctggaccactaatgaccatccacaatgatccactgaatgtcttacactagacgcaacgacacaagagaaataaaacgacaatgcggcccagcaatgctggggcccagaggcacggctcagaccaaagcaggatcagagagaagggagcagggaaaacagacctggcgccagggaccgggcaggccagaggcttaaggaagccgcgggaggcctgaggcaaaggccgctcactgcgccgcagagcacagaagaggagggacctacccccaggcaactctggaaagcagcgatccgactgcactgtaaggccaaggacaagaagagccacacacatgagggctgcggtcagaaagtctgtgtctcgcaggggtgcgggccggcaactctccacactctacaggcacgctaggtttcaacgaataagcaaactcactgtggacagtgagcgccagggttctcaacacctgctaaggttataagcaatgggggaggcgagaaaccctgctggggtggatgtgaatctgaaacaccggtatgatcccatggtttttaacatgaacgcgggggataagcacatgtagatgtgtgtacacacgcatgctagtgtggacgcgtgtgtctcctgcctgcatccagacctgtgtttctagcaccatcctccaataaaataacagaagctcagggatgaaacgggctggtgcaggaaaaatacaaggatcccagagcatcttgcaggttccaggagaggaacagtcagaatgtgaaggggcacgctgaaaagatgcggggctacctgaaggggtcccacgtcaggaggaagaggggccttcaggcaacagcaccggccatgtgggagcctgggtgggagggggctccagaagtgagcatggactatccagaaaatggccattagtcaaatggacagatgtgcctaagagctgtaggccgggtaagaggcctgtagcaatgctaacctgccctacgatcagacgagatgatggcaacaggggaagccaactataggagccctgcactactctggccacttttctgtaagcctaaaatcattgtcaagtaaaatggtaagagaatatttatgaatgaaatgatatgactcaaactatggagggtgcggagcaggagaggaggacaggatgagtgatggccacatgagtgttccttatatcttctcctccacttttatgtacatttgaatttttccacaataaaaagccctttaaaacttcttctcggccgggcacggtggctcatgcctgtaatcccagcactttaggaggctgaggcaggcaaatcactttgagctcaggagtttgagaccagcccaggctaacatggagagaccctgtctctacaaaaaatacaaaaaaattagccaggcatggtggcatgcatctgtgggaggctgaggcaggaggatcgtttgagcaagggaggcagaggctgcactgagctgagattgtgccactgcaagccagcttggttgtcagagtaagaccctgtccccaagaaaaagaaaaaaaaaatttttctcaaagtttgcaaattcaacgtaaatctggtctccttttctttttaaaaaagagacagggtcccgctccatcacccaggctggagtgcaatggcatgatcacagctcactgcagcctggacccctgggttcaagcgatctccctgcctcctgaattgtgcccatccatgccaaaggagcagaagttctatgggcagcagcctctccctcacgccacatttgctccatctctccacccacagttgccctcacaggtgccatttctgatgatctccaagccacctgccaatcgttttccaccctgcagccggtgggcctgcctgtctcccacacttgcccctccttgggctggatgatgatggccgttccctggcagcctctggccgcagcagtccccgacaccccatgctccaggccactttcctgcccctcctactggaccaagcacttgcttgcactggagacacctgccattttccatggatttgtgagtgactgctcacagactcacatctgtgttcatgactcagaccgtgagctcgcaaggcagaagccaagactgtgtccattcaccattgtccccagtcacgggcatgaccccagcacatagctgtcactcaacactgactcaaagaacaagcttctttgacatatgaggcatccaggatggagtctgggtaccggactcccttttcggccttgttcaatgatgttcacctttattacgttcatttagtcatccaggttccaagtatgctgtacactctggcatgaagaaatgaacacatctaatatctattaggtgatctgggcaaaacatcttaaatctaacatttttttccatcctggcaactaatctgctagaaatggtttagtatggttcactttctaaaaggttcagaggatagtaacaagtgttgatgaggacgcggagaaactgaacccttcgtgaactgctggcgggaatggaaacggtgcagccactgtacaacagctaagtgggccctcaaaaagttaaacacagagtgaccatctcacctagcccatgagaaatgaacacacacgtccacaggaaaacttgtacacaaatgctcacagcagcactatttacaatagtcaaaaggtggaaacaagccaaatcgtagatgaactgggacatatccatacactcggatacttgatgacaaaaagaaatgaaacactgatgctgccgtgtgaaccgtgaagacatgccgagtgaaagaaggagacacaagagttcactggctgtgtggcttcatctatagaacatactcggaacaggtcaatccagtgagacggaacgcagatgggtagttcccaggggctgggtgggagcgaatgggggtgactacttaatccacatggggtctcctcttgggggaataatgcacatggggtctcctcttgggggaataatgcacatggggtctcctctcgggggaataatgcacatggggtctcctctcgggggaataatgcacatggggtctcctctcgggggaataatgcacatggggtctcctctcgggggaataatgcacatggggtctcctctcgggggaataatgcacatggggtctcctctcgggggaataatgcacatggggtctcctctcgggggaataatgcacatggggtctcctctcgggggaataatgcacatggggtctcctctcgggggaataatgcacatggggtctcctctcgggggaataatccacatggggtctcctcttgggggaataatccacatggggtctcctcttgggggaataatgcacatggggtctcctcttgggggaataatgcacatggggtctcctcttgggggaataatgcacatggggtctcctcttgggggaataatgcacatggggtctcctcttgggggaataatgcacatggggtctcctcttgggggaataatgcacatggggtctcctcttgggggaataatgcacatggggtctcctcttgggggaataatgcacatggggtctcctcttgggggaataatgcacatggggtctcctcttgggggaataatgcacatggggtctcctcttgggggaataatgcacatggggtctcctcttgggggaataatgcacatggggtctcctcttgggggaataatgcacatggggtctcctcttgggggaataatgcacatggggtctcctcttgggggaataatgcacatggggtctcctcttgggggaataatgcacatggggtctcctcttgggggaataatccacatggggtctcctcttgggggaataatgcacatggggtctcctcttggggtaataatccacatggggtctcctcttgggggaataatgcacatggggtctcctcttgggggaataatgcacatagggtctcctcttgggggaataatgcacatggggtctcctcttgggggaatgaagcggtttggaagtagacagcgatgatggctgcaccacactgtgaatgcgctacacgccactgaattgttcatcttacaatggttcatccgatgtcactgccacacgtcccccggcactccagccttggcctgtctcctgagggcacacagggaggcagtcagcctccagcagccagtcagcagtcaggcccccggctggacacgggtcacacctggacctagcaacatccagaagggcagggctggtgggagcggagggtgccgtcttgctgcgtgccccctgatgtggccatgcttccctcccgtgcacacctgttacctgtctccatcagtgctatggatgcagccccatggcccctccctccataatggccaccatcatcacccctgccaggccacagacgtcatctcccatcccaaacacagccctgggaggccacttgccaccgagccacaaaccacaagaaaaagaggccccagggcgggatggctgcagaacttttcaaaagggtaagcgagtttcaacatgcagatttaactcttaaacaaagaaatgactaaaggcagtaagcctttagtgagttaaagaagacacatggcgaacactgcatagacacaagggaaccaagatgatcccggggcaaggaggtcacagtgggtgatggagacaggacaggagagcccaccatagggcgagatgcacggggagccaggaaggtgcagggcgagcgcgatggaccgtcccctcctgggtttctggaaccaagcttgtccataacagacactcacactggcttgcatgggtggcacccactgtcctcaggccagctccgaagagcccccacccagcaggtctcgactgggtcacccggctctgccccctctggagccctgcctcactctgggaggcagcccacctgggccagccttgccccctgccttcaagcacaccccaaacagccaagcagggcgagtccccatttgtagaagtggagccagaacgtccacactgcacgcacctcagggcacagagccggcgtgcgtggcagtgaccacctcaccctggacagggatggacagtggcagaacaaacccaaacttggagagcctgcatccaaacacccctccagctccggccaccaatctgcaagaaagacactcggaacagagggcacgccgggctacacccaggagatgcagctgcgggagacggcagcactgagcagccagcgtccccaactaacagcaaggctgggggctcaggaggaggctctggtcctcgcattccgaggccaccaactgcgaacatccacaccagtgagcaacgggcaactctggcaccgtgtgctccccggctgggaggaagggttggacttcggatgccggacactatgcggggcatataaggagcacagaggaagacagacacacacccatgtcatgtggtgacatcttctgaaacatctgtcaacaagacgatgccactgggatctgcaatgagaaacgggaaacgggacgaggctcaaagagaagcagcatcaaccacagacagaccatgctggaggcgggggatagtgcatggcacacacccccatcccgctccttccaacggcccccttgctccagagcatgccctccactgggaccatcccagcagcctcctccaggaaggcctccctgcttccaccccaccctcttggtctgtttctaacacagtggccacagggatccttttaaagactaagtcagctggcgtccctcctctgctcagtccctgctgcacgtccctggtattgatctccctgccctcagcctgcacctgggccctggctgcatccctcctttgctggagtgcagtggcgcgatctcagctcgctccaacctccacctcctgggtagctggaattacaggcgcctgccaccatgcccggctaatttttgtatttttagtagagacgggttttcaccacgttagccaggctggcctcaaactcctgacctcaggtgatccgcccgccttggcctcccgaagtgctgggatttcaggcgtgagccactgacccctgtccagtcctactctttcttggtgggcctgtgctgaccaccaggcaactcgcccctccccagccccagcccctgaccctgctcaaccatggtctttcatccctcgtatccagggggtgctttacacctggctcactggtgagtcctgttttgatgctgcccccaagccctctcctcaatcacacaccatgaacgggcctcacccccggcctggctccttccaatggcatatcctttgcaaagcttcccagagggagtccaaccagagttcccgccgactctaccatgcgcatccccgaccagatcctgtgttcacctgccagtcctggaatggccaggctatgtccacagggtcaccctcaaatgtttcagaacattccaggagaatgctctgcactcctcaggggagctgcacagaacagggaccaccccccaaaaagcttccagggccaacagcgaagttaaggtgtgatgagtgagcgtctcagcactgagaatccatccacacctaatgtgaccgttcttacagtgaggcacgcgctttagcatctggcaaactgcatacttcacgaagcagcagcacgcacagggaccaaggtgcgcccagcaaggcccccctgccccagtcaccaatagggccactcgagccaccacggcaaagccatgggcagcacgtggccttctagttccaccggcttcagctgggttcatggcccgggggggcacagctggcgccctttcggcgtcgctcctgtctacgagcgggcaaggaaggtccccaagagctgtcggggtccggcgcacctgggtctgtatagaggtgagttctgagcgacacaggccatcttctgtgtccctggcccgagcctctcaaggccgctgtggacaccagacagatgagtgttatttatcagagataagcctttttaaatgttttcttatccctccctgcttgcaaagtaaagacccagaggtcaacaaaggggatcaaagggaggaggaacgcccgccctactgccaggcagagtaacgcccccatcacggcgggagtaacagtcaccatcagagggaccttctgagggccctgcatgtgggacacaactgcaggtcgcccgcatcatctcctctgatcaaagcaccaccaccatgaggacgaggttttcactctgtacgaagaggagactgaggttcagagaggtgaggtgagacacccatcacgtggccaggattccagtgaggtgggcctgacctgagcctgcgctcagggtgctgttatgctgaggcgggcatcctgcaacgtcacatgagcccccagccactcccaagagctcagacacctccacacacagatttgttccaagtcacccctctcatcactcttggcatcttcctttgctttctctgcattttttacccgtgttactctattaattcctttgtccctgcaaaaaaacataaaacaaatgatgccccggcttgccagcctgaggggcagggaggccgccatccctcagggcctccctgggcttctcattcccactgctcagcctgcacacgagcatggggctgtgctcagaccagaatggtgtccaggtctctgagcacaccaggcgccacacacacaggacactgatcatcccgtcaatcataactgggactcagacacccaccccaaagcaggggctaaagaactccccatttatatccagtgcccgccaccttcccgccctgcataagctcacttagagcaagacaccagagaagcctgggaatgtgggtcccacgggaggatcctttcactatcaaagccaaaaagaaacagggcaaagcaccctcgagtcctccaaccgtcggaacaagagtgctgatgcaaactcctccaacaagtcaacatgatgttggaaagacaaactcacaacagttctattattttactcaataaggcaaacctgacaaacatctcaaatggttatgacctatgaacttcagtttttgatctttttatgtgcagctgcaagatgaaagtttctagtggctgccttctggcagcagagtacactaactctctaaggacaaaacagagctgaaacactcagaaatgacgtggaaaacaacaacattgccctgagttactgccccagtaggattttcccaagatggatgtcaattacagtaagagattcgggttaggggccgcctgggctcctgagtctggctgtttctaagccttgctgcagttgtgtttgttttgggatataggtccttaaaaacaggtattggccgatttgcattgcatttactgaagccccagtaatcaccttcagaagtccccttccgtctggtagtggactagctgtgttcacagcaacatggaaccacaggcggcaccccacacaagcatggcggtcacttgtcagagctccacgcttcatcagtaaaggagaccaccacaaagtccactgtgggacacccaacacgcgatctcccacagatgcaccccccagggctgctgcccccactgtctcggggctgtcctccaggtttctggcatgggctcctccctccctcaattccactcccaggaggatgctccctggagctgctcgagggcttctacctcctctccccacccttatcccaaaaccagggggtcccaaacctggcctaatgggcaatcacctgggacatctgtgaaatcagcttcctaggtcttcagggcagagaccggaagaagctttcaggtaattctgtgattcctgctcccccggccgcagcgcccactgactgagcaccagctgtgggcaggccccaccccagagctcggcccagcctgccctgacccactgccttactggggctgccagatgcactgcctcctgagccacttttgcttccccagggaacgaacacccacgtgtgtgaggccccaggaatgaggaggacggcagccccaccagggagccaggcacgtggagctgcaggcacgtgtgtgtgtgcgtgtgtgtgtgttacatacctgtgtgcgtgtgtgtacctgcagatattttttattccctgtgcatctgcataatattctgcagtgttaagcagcacagatgcttctgagaaatgctcaactctgtgctgggtgtggtggctcacacctgtaatcccagcaccttgggaggccaaggcaggaggattacttgaggccaggagtgagaccagcctgggcaacatagggagacctccatctctacaaaaaatagtcccagcttcttgggaggtggaggtgggaggtttgaacccgtgaagtcagggctgcagtgagccatgactgtgccactgcactctagcctgggcaacagagtgagaccccacctcaaaataataatagcagcaacaacaacaataataataataggccgggcgcggtggctcacacctgtaatcccagcactttgggaggctgagccaccgtggatcacctgagctcaggagttcgagaccagtctgggcaacatggcaaaatcccatgtctactaaaaatacaaaaaaaaaatttgggtatatagtggcacatgccagtagtcccagctactcaggaggctgaggcacaagaatcacttgaacctgggaggcggaggttgcagtgggtcgacattgcgccactgccctccagactgggcaacagagagagactctgtctcaaaataaataaataaataaataaatttttaaaaattctaaaaactaataataaacgcgcgactctggggccacggacttttttgacagatcaaacaggaagagaaacactgcacgaaacagtaggggccaggctctgccagccaatgtgtgacctcggctccggctgtcactgcaggcctccagcaccttctcttctgtcctgggtcactgtatgaagactaaggattcgtggggaatgtgctgcttcccttcagcgcaggcgcccgtgcccggggccaggtgggaaggcagaaaagtcactgtatgggggaagtaaggttggagaggatgctagtcatccaggccaaagtccccacttaacaggcgagaaaactgagaccacacgaggagatgcggacggggctgcagttctgaccagactcctgtctgtccatctcgatgacagtgagaagatgaaaaaggagggggccgggcgcagtggctcacacttgtaaccccagcactttgggaggctgcggcaggtgggtcacttgaatccaggagctccagaacagcccgggcaacacagggaaaccccgtctctccacaaacttagctaggcacggtggtccacagctgcagtctacctgggaggctgcccaaaagggctgaggtggagctccggagcccggggaggttgaggctgcagtgagccatgactgtgccactgcactccagcctgggccatgagagtgagaccctgtcaaaaaaagaaaagaaaagaggagaggggaggggaggggagcagggggaagaggaggggaggggaggggagcggaggcgaggggaggggagcggaggggagaggagaggagagaggtggggcttccagttcctgatccaacccacacagcccggttcctggcagacccagggaggcctggcccacctcccacaccctgcttctcccagctcacaacggggacacgcgtcagcaccctttggaaagaactactggcaacctcaatgacaccacactcacgcccatcagattttctgaggatttcaggaagtgcagtgccatcaggggtgaaccaagtttaaaatgttccagcctgttcatctttaagctacacacaagccccagattttaaaaacgcattgaatctgagaggccgcccgtccaccctgctttgcacggacagttcttgtgtctgcctttcgtaccagggaaagcttacaggtgcccactgccctggaggaagctcccagcacaaatgctaagtgtctcctcaccctgggtgcagctctatggagacagaaactgggagggcctggcgatttggtcacaacgtgtaaaggaccaagaacaaagagtggtttcaagttcctaaacttttggaggaaaaaattagaatagtggctacagcgaacaagtgcaggcccctgaccgcagcagcaggcttggggctctcaatgtgtggcgtgggccagcagatccccagtgaggaggagagagcaaccacaggcagcacagagctggccacaaacgataagggcagagatatgtgaaagagggagccattcccaacccaacactggggagaaaagaatccctcttatttgaaataactgtaagagataaactgcacaagagcctccagttatcttccgtatttgccataggtcatacagtgtcgcttctgctgaaagaggaccacaaaaaggattctgctgcaactgaaaactcaagatgcaaagggacctgccccaacactctgcgtaacagcctgggcaacatgtcaggactccatctctaaaaaagtaaaacaccttcgctgggcatggtggcacatgtctgcagtctcagctactagggaggctgaggtgggagggcggcttgtgcccaggagtttgaggccgcagtgagccatgactgtgtaactgcactccagcttgggcaacagagaacaaccccaaccctcagaaacaaacaaaacaaaacaccacttaaatgtgtcagaattaaaaccatgagcaactgggtctccaaacagcccccctcaacaaaacggagcccaaaaaacaaaaattttgagcaatggggctctttctaaaaccattaaagaaaaaacggagggggaggggaggcacgaatgctctgaagaaaagagattttaaaagacgtaggccgggcgtggtggctcacgcctataatcccagcactttgggaggccgaggcaggtagatcacctgaggttgggagtttgagaccagcttggccaacatggtgaaaccccatctctaccaaaaatacgaaaattagccggacatggtggcttagtcccagctcctcaggaggctgaggcaggagaatcgcttgaacccgggaggaggaggaggttgcagtgagccaagatggtaccactgcacttcagcctgggtgacagagcgagactccgtctcaaaaaaaaaaaaaagaaaaaaaagaagacgtaaatataacaagtcaaatgcagggagaagagagagggtgggctagctttagaggcggaaggcagagacccaaatgtgtgtgtgaactttggttaaaattcaggatccaaagcacccaactggaaacacacttctgagaatatgagagaaattgatcacagactgttaactgtcataacggcactggggtatgttcaaaacgtctccattgctttagacacgcatatttaaatatcgaggtaaaatgacaggtctgcaattcactttggaaaacgtccacaaagaaaaggggcatatttgaagcaaatgtggagaaccctgatgactgctaaagcttcctaatggataaatggaggggtattaaatgagtcactctacttttatgtcttttcaattatttcacaatattaactatttttaaaactcaaatgttatgttttgaagattcacagtaacgattcgtgaaacaaaaccacattttatgagactggaccattacaggagagcattcactgtacaacacacagagaataagcccaactggcattgtggaaacttttgacatggaaactagaagttaaaaaataattctgcttcttcaaattgcacagggtttaggagtttggaagcgtttacatctttttttcctatgcacttacttaaattattccccaaggtttatcaaagacccaagggggactctgcacaaatacccagccatgccgcgatggcctcggccatgtcaactgccccacgggtagagggtgatatcctgccatggcagatgggcaccagtattgggagaagtggccataccttcatggggaccactgagggaagggggagagggggcaggaggagttaaatggctctataaaccacagtgaagttcagctcttctcaaagtcacaatcctatttagacaactgtcaagtcttagatgtcacagaggttactttgtggcaaatctgcgaggggtgtaacacacgggagcttgaaagtgtagcaaaaccataagagacaatatcctgggggcaggcaatcactagacacagatcaagacctttaaatggttaaaaaaccaaaaaactaatttgttcatcagtgaaggttcaaggtcattggagaatccacccatcttaaacaactaactcagttcaaaaaacgaaaaaatagtaacatttctaacttcagattctaaatagcattcacatacgtcacagcatttgtttgtgattggtataatgtagagctattgtgaactgctttttaaattagtaagttgcctaataagggtgttacaattggaagtagcaaaactatttgtaatttttcttttcttttttttttttttcttgagatggagtctccaagtctcactctgtccccaggctggagtgcagtggcgcaatcttggctcactgcaacctctgcctcaagggttcaagcgattctcctgcctcagcctcccgagtagctgggactacaggcgtgcaccaccacgcccagctaatttttgtatttttagtagagacggggtttcatgatgttggccaggatggtctcgatctcttgacctcgtgatccgcccgccttggcctcccaatgtaatttttctataattcaaattgaatgtcttataattctaaattagaaagtataagattaaaaagagtctcaatgaagactattccaaaaattccttttacacaaaattaaaagccttaatgtgtagcataaaatggaactgcaccacagacttataattacagcacgtttgtacaacctgaaacttgggttcattcccatcctgccattagctatgaattatcctgcagacacatttattctttcaaccactgtcctgttccagagggtccactccctaccaggcccacaccaaggcaacaatctccaaaaagcagcgagtgacagaaacgagcctgtggatcatgagggccaaggtacgctgaaaaatgaaatcgacaagacagcatcccggggcagtgcacacagtacagcagtgagctggggtggcttcctgaagccccgctgtcaatgacaagtatgcgggcaggtgctggtccagtccagccctaacagagacttcttactgtgggtctgggttatagggcttgaaagggactgccctgaggaaggcacccagagaaccagctcggaagtcggaccgattgtcctgatactcactcactgctgtgtgaccttggtgaagttctcaacctctgtgagcctcggctgtctgtcttcacaaacaccaccaacctcagcaagtggagtgaattaagtaacacgcaaaacacaacacagaaagcttgaccttccttaaagcctcttcactttttctgggcctccaacttttaaaaccgataacctgaaaaaatgtagtgctgtcagtcccataagctgggttcctctacaaagaggagctggaaggtcccaactcacaaggggatgcccggtcctttcccaagagggggcctggccacccaaggcctctagaggccagcacctgctccaggactgcggcccctcccaggtggagggggaaaatcattcttcaaactgctgatggccctcaggggttgaaaagttggtcagactccgccttgttgaagctttctaaatgacatcagaaaaaagacgcgacattcgcaaggcacagagccaacagctccagcagtgggggccaccatcaacggaccaaggtgggccagggggccttccggaccccacaatttggggccggtctgcagcaacgagggcagcatcgggaatgcgagcctcctcgcccggccgggtaaacataagcccagagcccggcggggcctgcgccgcctgcggcccggctggggcccagcggacaaaggggagcaggcggtgccccgtcccagcggccaggccggccgagagagccaggagccacgtgcccggtgggagcacgccaaaagcaggagaacacctgaccgtttttttggcccaccaaggagaccgccttctactctgcatttaaaaagaaaaacaacgcgttaccgctttaagttttttagaacttttccagagaaaggccgactagcaacaaggggtgctacaggaatccacctcgcctcacctctcctaggaaattgtaaaaggaattagcacttgaatggggaggccggcgtgtctggaatgagaacgagccgcgcacgcagtttgagggttccggggagccgcgtcctcccctttccaggcgacagccctaactacaggaattggccaaaattcagcatttccagactttccttgggaaaaggggccgaagaagtgccggcaacaagaagggccacaacggagcgcgccacagactcaccgcggctggggtcgggaccggcgcagccccctcccctcccgcccgtgcgcgccccgagccgggcgccccgacccggcctccacccgctcaggcgctcagggtcaggccgggccgggctgcggcgcccccatccccgcccgggcagcgaggccgggccaagcggggcgctccgggcctcgggcctacacgcggcggccgcctcggccccggccccagcccgcgggccccgggcgggggatgcgaggacgctgggacgcgggcccgaggcgcgggaggggcccaggccgcgcggggcgccccgacgactcgcgggggccgaggaggccggggctgcgcgtccaacgcggggccgagaaaacggccggctcggccccgccgccgccgctcctcgagcccccaagcgcggccccggctcgcccgcccccggcccccgccgccccgaccccgcggccccccgatccccggcccctgccgcccgcgccgggcccgccaaccacgggcaggagcgcgcgaacggccgggcgggcgccccgagcgccaggactcaccggggccggctcccgagtacatggtggcgccgccgaggggctccggggccgaggggcggccgcgcgcgcgccacgggccccgacgccgcgagccgcgagggagccgccggccgcacgatccgccccggcgcggccgcctcgccaaacaggtttacccgacgcggccggggcggcgggcggaggcggcggcgggagcgggagcgggaggggcgggggaggaaggaggagggagggggaggggaggcgaggccggcggcgggagcgcgctcgcggggggagcggggctgggcgcgcgggcggggtccgcggcggcggcggcggcggcgccgggtctggcggggcctggggcggggacccggggaggggcccggagacctcgccgggcggtgggaaccgcgggcgggagcggggacgagggccgagggcggcgcggcccgtgtggcgcgggggcgggcgcggccccggggacccttcactgccacccagagaagccgcgtcttcccgacggggaggagccgggccccccggctgtgccgccggagccggaggggaggccacgcgcccccgctttccccgccgccccccggtggggggcgcagaaccctcccaccctcagcccctcggcccccagcctggctctttaagttactacagaaacacggaggtcgggaagctccctcccagcccggagcttgaacttgaacgcggccggccgctcgcgcaggaccacaccgccacctcccggcgcggccccagaacccagataatccgtttaaagcactgagaaaatctaagaagtttttagtaaactgtagctggtatcagggatcagatcagcggacacgcccattccagcagtcaggggcctgctcggaccgtcgtgcacctccgagcgtttctgtccggtccctctgggtccgtctggttttcggaggctttcctggaaaagccagcctgtggctacctcctttctcccctaagtgatggaggattagaaggcagaggttgacccacaatctaaagtgcctggtcgccttttcccagatttcccggagcattccttcaccccgtggcatcggctgtctgcatatgggtgcaaggccctgttccgggcggagaataaacaggagttctgactgacaggagctccgcagccagcagggtggtcactagttctctgcagtctcggaggacagccctgaagaagggcaggagaaccagcacttcctccgaaaactcaaaaggacatcagtcttcaccaagttgccgatacaaaacgtgctcctgaaatgtgtagtaatgaacaccaggaaacctgggtaggagtgtgcatggcattcttcatcaccgcttggactgcatggcactgaatacccacggagagcaggatggagaaacagtgtgctcatattcacaggatggaatctagccattcacaaaaattccaaaacaggcaaaattaaactgcattctttagggaagcatcattaagtagtaaataattgacagaagggcaagaaggtgcttactctaagtgtcagaatggtggatacagctgggggt

SEQ ID NO: 20 - DNA, 15381 bp, Homo sapiens
  source 1..15381: mol_type = genomic DNA
actgagatggaccccctccccctcagctccccatgacgtccccagcacctgaccccaggctgaccacctcggccaccacctctggccccaccttcctccccaggtttgttcccaaacacccctagagtcttttccggagcaatctcagacgtgcagaacgctcagggggaccctgggcctgaaggcggtaggagaaaccgagaccgacccctggtctagaggagaggtgtctgccgctctccatcctggactctggctgcccaaaagcaaacggcacgcctgcccacgtgggaatcttggtggcgtctctcactgcatcagttagcccccagcccagtgctgcctggattcaggcttcctggtaccttcgtccacccttcagccctaatccatgctggccaggtcatctcgttctctggctcagtgggaacactcgtgcccagagacctctcgtggttctctgcagcctgcacacagggcctgcttccctggcttgaccgcacagacaaggggactgttaccaaggcctcccactgaggccaccccccctccaggccatgcctgcggggccaccacagcctcagcatcattgcaggccccaggcctctgcacctggtcttgttttactgggggcactgtccccactcacgtccacctgggaccctcggctcctgtccactgcagctcccctcccggacaccttcccagatgcccccggaagctcctgtccaggccacagcatccctcagcctctgtcactggtcctaggaagaccctttgggagctctcactcagggccacactcaggacccccgttgtggggctggccgccttccttctaaagcacctggaggaaggaaggagggggtcaatgcgagcctcaatccccaggcgagtgtgccccttttaaagatgagggaaccgaggctcagagaaggaaaggacttgcctggcgtcacacagctagcctaagatggtgaggtcaggagctccctggcaacacccaggctgccgtaccgtctcctgcatcagactgagcctccatcgggctcctcccacagccccaggcgggcccctgagtaggggctctcagcttgtgtggaggtcccccaggaacaccaccccgatccagcctccatggaggctcttgccggccactgggaggggccggtgcaccctgggcagcccctgccagggccctgagacccgagcctccccgccgagggcacctgtctcggctttgccccattcgagcagggccctcgccgaggcaggacagggccacattcggaagtgagagttctctgagtcccgcacagagcgagtctctgtccccagcccccaaggcagctgccctggtgggtgagtcaggccaggcccggagacttcccgagagcgagggagggacagcagcgcctccatcacagggaagtgtccctgcgggaggccctggccctgattgggcgccggggcggagcggcctttgctctttgcgtggtcgcgggggtataacagcggcgcgcgtggctcgcagaccggggagacgggcgggcgcacagccggcgcggaggccccacagccccgccgggacccgaggccaagcgaggggctgccagtgtcccgggacccaccgcgtccgccccagccccgggtccccgcgcccaccccatggcgacggacgcggcgctacgccggcttctgaggctgcaccgcacggagatcgcggtggccgtggacagcgccttcccactgctgcacgcgctggctgaccacgacgtggtccccgaggacaagtttcaggtgggctccccgcccgccccccgctgcccccaggccctgtgagccagggatagtccccggggaagttccaggaggaccccgcccctccagatccccaagcccctccagccttccccaactccctccccacaaggagccaggggcgtccctgatgacaagttagaagttggtccccttcccccagccgtccccacacctcacccccaagccaagggaatggcctccaggttcccccagccccaccctcaacacccctacaccaccacctgactccaccacaagccgaggagatgggcgtggagctgtccaggtcgccagcgcctctgcctgggagctccaccctctagtcatgatggagatgggcaggccgcagggtgtgggggaccatggcagggaccctcatgccaccccactgcaggagacgcttcatctgaaggaaaaggagggctgcccccaggccttccacgccctcctgtcctggctgctgacccaggactccacagccatcctggacttctggagggtgctgttcaaggactacaacctggagcgctatggccggctgcagcccatcctggacagcttccccaaaggtgggtcctggtggactcagccatgctgggggcctggggcagctgctgtcacctgctcagcccagctggactggaaccggagtggtgtttgaggagcccgtgggtgatgttccaggaccgtcttggatcctaagaggcaaaggggccaggcctcacctgtctggccaaggtgtccagttctggggcccaccctacccctggagaaaaccctgaggttgggaccctgctcctgcccctgagctgcagatgtggacctcagccagccccggaaggggaggaagcccccggccgtccccaaggctttggtaccgccacccagactccccaccaagaggaaggcctcagaagaggctcgagctgccgcgccagcagccctgactccaaggggcaccgccagcccaggtaccctccctgcaggggaagccagccagggtctccagtcttcccgggcttccccgggagcccacgccccctccccacccgggctcccacccactgggtgtggggccagcctgcctggggctgtgggggtctcctctgggtactagacccacacactggaccagcctctcagctccctcctgcctgaaggctgagctccccggagctggtgaagtaggcgggcgggtctcatttcccttttactgatgagaaaccagagcccggcaaagggactacccagcactggaccgccccctccacgccctcccaccgcgggcccctgcccaccggcactcacccccactgagaggggaggccaggctgcccccagctcccccattcaggctctcaactgaaggccaagccccccaagaagccggagagcagcgcagagcagcagcgccttccactcgggaacggtgagcggggcccagtgggagcgcctcccttctccctggccaggggcaaggggtcaggggtcagagcagggcctgccctctgagaccctgtcctaggggctggggacgtgctggcctggtgtgtcattccaagggcctaagctgcaccaccagacccaggaaggggacaccttgggtctaagcatgatcttgccagtcgcccctgcccccactgcaccctggttctgggacccccttctcaggcaccttctctgcccgtccactccctatccttcaggaccagcctagacatagcttcctccagaaaatcatccctggcccccagctgcatgcaggctgaacccttcctgtccccttctccttccttcccagggcactggactccagagaccccctatctccctgagggcagagcctaggaactctgtgtccctcccggcacaatacagggcccatgtcatgggggggtgggtctggtcattggtcatgccttcctatccattgtgccagctctgctgacactgccaccccccagcacacgcacacttgggtgcacacacgaacacacacattctcatgtctctgcacttacctgtgggctgtctgcacatggcagggctgggtcccctccttggcctgccctggctggaaggaaagggctctgcagcccagtgctgcctgcttctggcatagagtatgtgcttgggaacagtcttccccacgggtgaccccaatgggtgttccctttcccagggattcagaccatgtcagcttcagtccagagagctgtggccatgtcctccggggacgtcccgggagcccgaggggccgtggaggggatcctcatccagcaggtgtttgagtcaggtagacgctgtggcggggagatggggctgatggggagacccaggctccaagatggaaggaggaccacgcccctttgcatcctggtggtcccacagcagaccggactgttgctcaggtagccagagtttctgcctgtggttctgctgactttggaggaggagggtgagcactgaagtctccctgtcgggggaccttctgcaaggccagcggtccaggcccacatccccacccgggatgtacagcactccccagtcacctccatccatgtgcatgggccctcctgggccatggggttgcatccttagaaagttctgcctgtgctgctgagaccctccagggtatcggcattcttcaaccaggacagcctgtagcatagcgtccttgccccccataccctggccagcctgcagcatcctcgcccgccattccctggccagccgctgaccccatgcaatcaccagtgccatctgaccagggcacagcagggccgctggtggcagacccaccgtgccatcggggcattccatctcaagtccctgacacggtgtctcctcggtgctggacatgggctgggaacaccaagcacagccagggccctggtcttgcacctctggatggtcccaaggcccactgtgttacttcctaaggctgttggttaaattggcacaaactgggaggcttgaaatgacagaaatgccaacatcgaggtgtctcggggccacactccctctggaggctccagggaagaatccttccttgtgtctcccagctgctggtcattatgggggtacccctgtgctccttgttcctgggctcaggacccaccgctccagcctctgcttctgtggtctcacagctgtctcccacgtgtcctctttataaggacaccagtcattgaacttatggtccagtgtgacctcatcttaactaatcacatctacaaagaccctgatttcaagtaaggtcacactctgaggttctgggtggacgtgaacttcgggggacgctgttgaacaccctggtgtagatccaggacaatccccgggccccagactcgactggggtgggggcgggctggaggaatgcaggctgtgggaactccacctgtctctgctagaccccaccctggggcctacacgactgccaaggcaggtcctgctgggcgggtgagccaggaccagccggcatctcctcccaggcggctccaagaagtgcatccaggttggcggggagttctacactcccagcaagttcgaagactccggcagtgggaagaacaaggcccgcagcagcagtggcccgaagcctctggttcgagccaagggagcccagggcgctgcccccgtaagcacctgaccttccctggggagcctggctcttgatgccccccgccccaggaacagcgttgcctctgggggagtggctctgctgggggctgggggctgctgccgagagacgcctggtgccacagccatgtgcaccctcgctgctgaggctgcccccattgctgacgcccctcttccttgcagggtggaggtgaggctaggctgggccagcagggcagcgttcccgcccctctggccctccccagtgacccccagctccaccaggtaatgccctagaccacaggagaggcccctgtctgcccttgctcccctcgggtgggtcctgctgcctctgcctttacctgggcactcagggatgagcaccggggcctgagcccctacccacagggtacagctctttttctttaatagacagtatttttttcctgataatacgcaatggtaatagtttaaatgagtcagagaaagtgaggtcttctcaggctcttaagagcatggcgtttggtccaggctgtacccgctgctctcagctgggcccgtgggtgggccgggcgcccctgctatagccaggaggtcaaggatccactgggaatgccatgctcatctttcgtccccagcatggtttcttaatggggtagaagcagtgtggggggtgcctgccgtggtgggttacagatcttgaccacttggcaccaggggctctgtggggccctggcacttagcagtgacaggagccagtcctgccctgcaggagcacccgggctggtgggcgtctgggggattgttagaatgagtgaggtcattgccgtgcaggaccagcctagcctggctgtctggggggattctggaggaagtggtacctgggagacccctgaaggcacagcaggcaccatccaggcagggcacaaggacggtgggggctgcaggtggaggattcagcaggcgctgaggtcgggagagacctccctgggcctggccccactgccctgtgaggaagggttcatgtggttggtgtacagttccggggcccctggaacgcagcagcctgcaagaaaccgggttttcttcccaatagggatggccccggggggtgtctgttggagaccagatggatggggaacaggtggtcagggcagaatttcaggccctggcagcatgggagcagggcagagactggggagttcaggtacccagagatgctgctgggggagctgttttgggaaggaggtggctctcaggagggtgctgcaccccagcccagtctgcatgggcgtctcttgcctgtgccagaagaatgaggacgagtgtgccgtgtgtcgggacggcggggagctcatctgctgtgacggctgccctcgggccttccacctggcctgcctgtcccctccgctccgggagatccccaggtgagcctgcacctctgccagcgcaaccaggccaccccggttcacggccgcctccacccactgaccctgaagggaagccaccccaagcctctcccatccaagatggaaaggggttctgagtcaggtcactgggccgtggggccggggcctggggttttcccaccctgccacctgcctcccggtctggccacacctgctgcccagcctggacagctgggcccctgagggcagcaaagcagaacagaggcccagggcgaagatgccaccctgtccaagctcatcccaggctgcagcccacgcccccatgggtagccggcccccacccccaagccccaccccagagtcccactccagacagggctggggagcacagaggccacagagctgtgccccccagggcaggtgggagtttgtccaccaatgcacaggacgccgggcttagtgggggcgggaggcctcctctgcgttcacatcccggtgctccttccccacggcccaccgagccctgcccccattccaaccccacaggacgtggcagtctgtgggaggaagagctctgggtgcagtggggacccacgttcaggcgaggctctgccccagcccctgagtggccgtcatcaggccccctctcagccttgtgcctcatcactagaataaggggcacagtgggggtcattgctcggctcctgaagccgttcctccttgccgtctctttctgcccttgatcacctccccattctgctgggtgccattccccttaacaggtgggtcagtttagggaggcccccggcagggcccagccctgagaggcaggcaaagccaccagggctcgcaggtgttggggattcctggggttcatcagagagcacgccaaggggaccctgatcacgctggccagggccaccccacgaagggtaaatgtccccctgctgggctctcccttcctgtgtctctgcccatctctctgctgtgcctcggttccccctctgtgaaaagacatggtcggagccctggagctccacccgtgggtttggggatctgtcacccgctgtcttgttctgcatgtctctgactggtggacacacgagcagtgggacctggaggtgctccagctgcctgcaggcaacagtccaggaggtgcagccccgggcagaggagccccggccccaggagccacccgtggagaccccggtatggccacgccccctcctagccgggccacccctcctgtccacatggccacgccccctcctaggctgggccaccccctcctgtccgtctgtcccctggagtcctgtgggacaggactgccccagccatagcactatgtcccccatgcccaagcccggtccttgtggtctcctgcagtggagtccccatcatggttcctgtgggcctaaacccagctctcctggctgcgggtccaccccggggggcactatgagcattgataacggccccggaagatgtgttccttgttctgctgctgtgagggtagtaggtctactgtgcacagacccagtgttccctctgacagccctgagggccagggggccccccgtgtgtagacgggggaggagggaggaccacagagccaggaagtgccacagcctttcccactcagtgtggacgccttccaccatgccagccctccgcccccaccatgccaggcctctgcccccaccctgctgccctgggtttcagggtcccagcagtcactgactcctgggtggtgccgggcaggcgcccgctgcccctctgatgctgacccttgggttccagctccccccggggcttaggtcggcgggagaggaggtaagaggtccacctggggaacccctagccggcatggacacgactcttgtctacaagcacctgccggctccgccttctgcagccccgctgccagggctggactcctcggccctgcaccccctactgtgtgtgggtcctgagggtcagcaggtgagcggggagtgggggtcagggtgggctcttcaaggagcccaggacctacggggcggatgaattcacctgaaacaggaggagagggaggccaggcgagaaaggctccgggaggcacagggcctggggctgtggggggagcgtggggggctgcggggggaaggggacgctcctagacctccactccagctcctggccctgggcattactgctccccccacaaggcaggacaatgaagggggggatgtcccagcacacgtgggagccctcccctccctgcctcaattcccttccctgcacccctgtgggcaccgcctttcaggagactcccgcactcagccccaaaggaggccaggcccgccaagcaggagagaggtgcgggcgccaggcttgcaggcagcagcctgagggtgcttgggtcgcccctgcctcctggggatgggactggtcccgctgtcctgcagcctgcgtggcaccgtgaggctcctcacttgcgcctagacccgccgtccagccctgggtggtcccaggggagagcgcacagggctcgggttcgggttcagctacatttcccccggccccccgcgtcaccccgcgctgttgcctcccacagaacctggctcctggtgcgcgttgcggggtgtgcggagatggtacggacgtgctgcggtgtactcactgcgccgctgccttccactggcgctgccacttcccagccggcacctcccggcccgggtgagtgagcgtggtcggcggggaggcctgaacccacacccacaccctacaccccaccccacactccccacccacatcatacagcccacaaccacaccccacccacaccccacactcccacccacaccttgcaccccaccccacacccatgccctgcacccacaccctacactccacagccacactccaccacacccccacccacaccctactccccacctcataccctgcacctcaccacactccacagccacaccccaccccacaccccacactcccacccacaccctacacccaccccacaccctacacccaacccaaacccacccaaacccaccactcccactctccacccacacccacaccccttcctcacaccccacacccccatcccccactcaccacccacgcccacaccccacaccccataccccggaggtggcactcctgctcccccccagggctggcagcccctcatcctctgctgcaggacgggcctgcgctgcagatcctgctcaggagacgtgaccccagcccctgtggagggggtgctggcccccagccccgcccgcctggcccctgggcctgccaaggtcagtgccgcaggggccctccatgcatgccggtgctgggggtggggaaccccttgggttggtgttgggggagcacatctcagggcagaccctgggtgccagcttcgagggcttgcaccagacgcactgaccatgtgctcattatctgtagaaaatatttcccctttaaaccaattctttttggcaacttaaatatagttaaaaaggaagctccccccgagggttggtggctgacgtcacggttggctgtgtggccgcctcacagcatgagcctgagagtcctgccagggctccctggtggggtgaagggagagcgggagcgcccggcctgcaggagcaaacccccaccctgtctgacccctccaggttgtctcacccccagccctccctggggccaggatccaccccactgtgtggccagagccctctcagagaggcaaagtgaccccgggtccagccagtagctcttcctgtcctcctgctccggggtcagagaggacctgggtggcgcggagacccctgactgctggggcggctgggcttgccctggagctgggtgtgggggaggcccgagtcgctgctgcaggagcctccgggggggtggcctcttgccctgaccgtccccagcagaggcctcctgagcacatcctggccaccgaggagcctttagggatcctggggtgatgacacgtcccacctgctccactggcccatgctctttcccagctgtgcctccgccccgtatacaccgtgtgggtgacaggccaccccggcgtggtactccccaggagggtgacagcctaccccagcgtggtactccccgggcaggtgacaggcttccccggcatgcaggctctggcctggcatggcacaagcctcagacccagccctgcccttggggcttttgtggaacagtggcgtggcccacagctgtcactgtccccttccttctagaagcctccctcctcacaccacccatctggagtcaggagcccagccgggcatatacgcagatgcccctccctaaccccaggcagctttcctgcaactgctcccgcagcgggtacctcgtcattaacctcctgggttctgtctctgaacagcagagacctctttcttgtcatcgtgatgtgaaatgtaacgccatgtcagaggaaaagttctggctggccttggcctcccccctcagcctgcccccttcctccagggtggttggacgtggccccagaccccatcctgagcagctctcccaccccctgggagcatccttaggaccggggagcatccaggggctttcccctccagaccgggcagcccctccctcagccatgcagggctgccgggcctcgcagcgccagtgttcacccgagtggaggagctgggatgtggctgtttggggccacaaatggggaattccacagggttcaatgtaatatggtctcctctctgctgggggtgcctgcctggggaccttctcccactctggtcgctcacctatagtgtgggctggccctggtggtgcttgtcgggggcgggggtggcatggaccaggcactttcctctctgggcctcagacttcccctctcagagtgggactccttgctggttccctgagctccctcgttttccccaggaggccacacagtgtggaggctgtctgggggccgtgggcagctggccgtgggcaggaccctggggaggcagccccagccccatcatgcccacgcagccctgtgcccccacccccagtggagctgggtgtaagaattcccatctcagtgtgggggaaacacccccgcggcccctaggccctgcggcctctgtacccccaccagggctgtgggagttgggctgacctcttctctttactgggttccaggatgacactgccagtcacgagcccgctctgcacagggatgacctggagtcccttctgagcgaggtaacgcctcccctggcctcctggtgctcctccactccccctcccctgcctcagccggcacccaggctccccactctgggggaggactgccggcccccactgctcttgagccgtggaaactcaggctgtccctgctccacccaccaggagccccagtgctgctgagcacctggcaccccccacaggagcccccctagcccccttgcaggagccccccccggcccctccccctgcgggagcccagtgctgctgagcgcccccagcccctccccaacaagagcccccacacggcccctcccctgagggcctgcaccctggcaggcagaggctcgagcaccaggctcaagatccactttcccagggagggtggggcgtgggagtggggggggggtcccagaccccgtccctctaagatttgcttgcccctcccaactcaggcctctctacgctaagatgggcaggtagaatctgtggggaaaatgtgacttttaagggctctgtctgtttttgccaagaggataagctccttcagcctccacgggttctcctcagtgtctgatgtggcacccgggggtcccagctgaccatggggcaggggttctgccctgtgcagtggccgtgccccacacaccctgaccgtgcaggtgtctgcagagccccagggcctgagagtgggccagggggcccagcgctgggtaatggagctgcccctctggatggggtccccgggtatagctggagaaatgagcgacgggctcacagcctctcccgggtggcggtcttattctgctggcatcgtggggcccgtggccccatcctgtgggagcatcaggctcctgagcagaataagtagctggccccgacccccccaccctgaaggagccacccgaggaggcagaactgccatgaactgccatggggatgtgccctgggcttataggatgtggtgaagtacacaggacagggtcctcggtctggcctgtgccatggggaccttgggcctcagtttccccacctttgatggaatacggtgaagtgcacaggacagggtcctccccagactggcctgtgccatggggcctcgggcctcagtttccccacctttgacttagagggaaggttggatggtgacttcttgtaacgatggccatgattctgtggctgcggcgggggcgcacctggaggttctcaccgtcactctgtcccgcagcacaccttcgatggcatcctgcagtgggccatccagagcatggcccgtccggcggcccccttcccctcctgaccccagatggccgggacatgcagctctgatgagagagtgctgagaaggacacctccttcctcagtcctggaagccggccggctgggatcaagaaggggacagcgccacctcttgtcagtgctcggctgtaaacagctctgtgtttctggggacaccagccatcatgtgcctggaaattaaaccctgccccacttctctactctggaagtccccgggagcctctccttgcctggtgacctactaaaaatataaaaattagctgggtgtggtggtgggtgcctgtaatcccagctacatgggagcctgaggcatgagaatcacttgaactcgggaggtggaggttgcagtgagctgagattgcgccactgcactccagtctggtcggcaagagtgagactccgtctcaaaaacaaaacaaaacaaaaaaaccacataacataaatttatcatctcgaccacttttcagttcagtggcattcacatctcatgtaaccattgccaccaccatctgcagagctgttccagcttcctgaatggaaactctggccccatgaaacactcactccccattcccctcccaacccctggcaccctccactctactttctgtctctatgacttctccagggacctcatggaagtggaatcacacagtatctgtccttttgtgtctgtcttattttactcagcatggtggccccaaggttcatccatgttgtagcatgtgccgaaatctgcttccttttttaaggctgagtaatattccagcacatggatggactgcattgtgttcatctatgctttcctcagcagacacctgggtgcttccaccttttggctgttgtgagtaatgctgctatgaatatgtgtgtgcaaatatctgtgtgagtctttgagtaaaatcgctggatcacatggtaattatatttttaattttttgaagaactgccatcctgttttccacagcagctacaccatttcacatccccaccaacactgcatgagggttccagcctccccatatccttgaaacaattactattttctgcatttttctttcttttcttttcttctttttttgagacggagtttcgctcttgctgcccaggctgcagtgcaatggcgcagtctccactcactgcaacctctgcctcctggcttcaagtgattctcctgcctcagcctcctgcatagctgggattacaggcgcacaccaccatgcccggctaatttttgtatttttagtagagacggggtttcaccatgttggctgggctggtctcgaactcctgacctcagacctcaggtgatccaccccccccccccccccccaccccacgggcctcccaaagttctgggattatgggcgtgagccactgcgcccagcctgtgtttttcttttatagtagccatcctaatgggtatgaggtggtacctcattgtggctaaaccatgtacgtttaagaatttacacacacacacacacacacacacacacacacgtgatgaagctgtaagaaaagggagagaataatgacccaaaatgtcagcacaaggatgcctcaggggtagacacaggtgtcttcttagcgccttttagcccacgcatatgtgcttgcgcagtctctcggtgtgttttctaacatttcacaattaaataaggagtagttgatattcacagccaccatttccaccgtatatgtagagaaaaatgctcaaatcctagcgatcagcccgctgagctttcacaaaccgaacacaccgtgcggtcacgaggcggctctcccgaacaccggctctgcacccccagggcccggggaaccaagacttccccaagggcccagcaaaagtgagggaggaggggaggaaaggagggagagggagggaggagtgctggctgctttccgccagcgcctcgtttgggtttcgctctgctgaggcctgaaggcgccctgagggcccctggggggcagggaggggcggtggctgcgg

SEQ ID NO: 21 - DNA, 14263 bp, Homo sapiens
  source 1..14263: mol_type = genomic DNA
attgcaccactgcactacagcctgggtgacagagtaagactctgttgcaaaaaaaccaaccaaccaaaaaacacctctttcttagcctctcattgcccttatgagaaaccctgtgagtctggttcgtacactgctagccttgtctcttgctaccgccaccccgctagcctgcgttacagcccccctctgcggtctcagctctcccaacacccacaggtcctttccacctctgtggctctgcagagctgttccctctgtcctttcttgccctctgtcttgtggcgaactcccaggtgtcttcagggccctgccccagaactctggtcaaggaacctcccaccactaggtctcctctgagcttggtgcactcagctgcccagaactggtcttggttgagtgggtctgacgggatgttgcgaacagaggcctctcctcgtgctgggagccatatcgcagcaggccaggggcctctaagcctctgtctcgctggcacggcgggtgctccagcaatgtctacagaacaagcaaacatgcatgaaagaaattcccaaaggaaggtttacggtggcaaggacggggtggtggttcccagggctttaaaactttttgcgtttccaagttttcagcaaagaggatatctgcatctagacagatgagagagggagagagatgataggtaggtattgtttacgtggataaagtgattctgtggtgaatcgtttgacaatttgaatcagcttaggtttcacaaactgggactcacccggatgaatgaagctgtgatcaaaataaagataaggtagatgagaaagaactaggacccccccaccaaaccgcctccttatctttattactttgtcttcatcctgagacagaatggatgtgtgagacagtgagtgtgtgtgcgtgtaagagtgaatgtgagtggtttgtgtgcacgtgtgtggtgtgtgcactgcatgactgtgagtgtgcagatgtgtgtgaatgtgagtggtttgtgtgtacaagtgtgtgaatgtgtgcatgtgtaaatgtgtgtgaatgagtgtgtgtgcaagtgtgtttgtgtgagtgggagtgcaagtgtctgggtcagtgtgagtgcgtgtgggtgactgtgtaaatgtgtgtatggatgagtggtttgtgtgcacatgcgtgtgtgtaaaagtgtgtgtgcatgcgtgtgtgggagtgcaagtgtgtggatcagtgtgtatgtgtgagtgcatgtgtgcgcgcgctggcgtgtgtgagtgtgtgtgtgtgaatctggtttgacagatgcaggacccaggacctggagcctgcggtgtccctgcgtgccccatcagttttctgccgatgcggaaaaccgaggaccagctgcagaggcctccacacagcccctaccctccacaacttccctgggacagaatggctccccctacatgccttgtcttctgctagctccgctgaactcctgtttatttctttcatgttcttctttcaatagattcaccttttataacttaaaatcgtttattttaaaggaaactttaaataaccaatggaaatgaaaaaccagccccacttgccatgaacagccccaactgttcggatttcattcgggcaggcggggtccacaagaggctctcttggcttaaagggagcccagcttgggccagatcaggtgttaaggacacgtgagcaccaaattgagcctttctcagtgatgaggtcaaaaaatgaaagcgcgcaggaagggttctccccaggggattctggggtgtccccaagtcatccggggccccgcacgcttcgggccatgctgttctggtctccagccctcatggccgtggcaatggacagcgtccactcctcactcagtgtgttctcatcctgaccttgaggtgggggtgagggggacattgagtctgttttagaattggaaacggctcacagagggtgggctgtgtccagggccacacagggggaggtccttcaggtctcacccctgaccatgactcccccaattcaatttctttttttttttttttttttttgagacggagtcttgctctgtcacccaggctggagtgcagtggcgcaatcttggctcattgcaagctccacctcccgggttcacgccattctcctgcctcagcctcatgagtagctgggaatacaggcacatgccaccatgcccggctaatttttgtatttttagtaaataaggggttttgccatgttggccaggctgctctcgaactcctgacctcaggggatcctcctgcctcagcttcccaaagtgctgggattacaggcatgagccacctcattgggcctcccccattcaatttcagtgacatgactgactccccacccacccatgccattgagatgcccttttcagaccctcagagcctctcgcgtcaaggaagccaattcactacccactgggccagctggcgtgggccgccccaactgcccaggaagccccactcagaccatgaccttgctgcctgtgcagtccaggccccggcaagggccaggcatggaacatatgctcagagcgatgggggtcagggccaaggccacagagcaagatgcagaggagcccaggctgggaccggttctgcctgaacatgagcccctcggagcaggggccccgccactcagcgccgggtcctcaggccaggcatgccctgtgcgaggaagggccccgggcctcccaccagagctagaggaggggtggctggcaaagggaggctgaggaggaacggagggttgaggggctggggacttgcggccaggtaggcacaagcacatgaatcaactccaactggaagcagagaaaaagcagtaaaaccaaatgtccttagaaattcctttagtgctcagctgtccatgaaaacaggataagcggcttcctccgtctgtgctcagcagggcagggtggaggcgctgcgctcaggccaggaggacctcgaatcaggacggggtggggcggggctctgagctggggaagcggctccagcgttgctactttagggcgtccaggtgggtgcagacctgggagaagacactgtccacggagccctcagcgttgacctgtggggagatgggccgtgagggctgagtcaccaggtggagtggggtgggcctcaccatggcaggccccagagaccaggcctgcctccccgagcccaacctaattgacagcagcccctcattgaaccagtggggaaaccaaggcccagagagaggggctggcctgaggccacacagtgagctgaggcggagccacataggaacccgttcttcccggagctgcccctgggcccgcggggcccaccttgcgcacaatgccacgtttctcatagaaggcgatgacaggttctgtggccttgtaataggtctccagccgctttttgatggtctcctcattgtcgtccacacgcccgctggtctctccacgtttcaagagccgctgggtcatggtctcagggcctgcgtccacatacagcagcagtgtgggctgtccaatctgcaggcgggcaccatgtcacagggaccccattcctgccccctagggccatctcctccccatcttcccatctatgaagccccagtagataccccctcagaccttcaatcccttccccaaggcagcctgaaagaccttcctaaaaccaatctttcctgccactcccctgctcaaacctacaccatggctccccagtgccctcaggagaaagtccacactacttgccagactgagagagcctgactctctctgctctaggctctcatcaacctccttccatgccagacctgtgctcatgctgttccctctgctaggagccctctcccccgagcctgatcctaactcgccttcacctcaataccaagcatcaggtttcagtgcgaagctcacttcctcagggcagtctctctgatgccaccccccgccccccagtactccccgcctcctggaacaggctcttccagcgcctttatctttccttaagcaggtctcccaagggcccctgagggcagggaggcacttgtctcacaattctggggtcctttgacaaaggaacaagggatgagggaaggggtgaggggctgctgagtcctggggggttctgagcaatgtccgtgtcattggaacagcatgtcatccatgtcatccatgggacgccttggaaaggcaagaggaataaggttctgcagcccctgcctcgctcaatccagctaccacagctgcctggttgggagggcagagccaccccagagtcacccatgactgccacagctttaggaatgggattgggaccttcaaaccctgtctcctgcttccaactgcctgggccagcccccaagggtttctgcgcagctttggccctggacccctgtcaaggccttggggcactgcctctcaggtcaggctgtttcgtgcctctgtccagctgtgtaaccaagaggcttgtccaaggccacacagctggacagaggcgagaagcagcctgacctccggcgtcagactgacctggacccaggctcacccctgcctctgttcagctgtgtgacctggggcaagccctttgtcctcgcctgcgatacccatcctagcgctcatccctagctcctccgtagttaaggattcagggtgacagcgtcagctgccttcagggagatgactccgtaccacccagcggctgcttctaccttacagattaccatgggggcaaaggctgggcctggatgcagcagtctgacctcaacttcaaggtcacccaccccccatcatcatccatcagctgctgagctcctccagggcacagactcacagtctctggttcatctgggtctccaggaccaagcacagtaggctctttacacacacccagcagaggtggtaaatctgggagagccagctcagcctctgggcttgagattctggctgtggggcctcagtctccctgtcaggacaatggacatctagcccggggagtccacaacgggcactgccagtctccagaaaagctttgggtgtgagccggccacacttccaggctgaccctccctccttcggtgaagccctggcgccccctggtgtccagagccaagaagaccagctgcccggacacctggaggccacagcagggatgggaccagggctgagcctgcggccctcagcggcacctacaacagccctggaagggtggggactttttttttttttttttttgagacggagtctcattctgttgttcaggcttgagtgcaatggcgtgatcttggctcactgcaacctccgtccagccaggttcaaatgattctcgtgtctcagcctcctgagtagctgggattacaggcgcccgccaccatgcctggctaatttttgtatttttagtacatgagttttcaccatgttggccaggctggttttgaccctgacctcaagtgatctgccctctttggcctcccaaagtgctaggatctcaggcgtgagccactgcacccggccgactttcattaactctattttctagatgtggccctgagggtcacaggtggtaccacacagctggtatgtgtgagccaggccaggacatctttcagaactgtggcacctaacacagggtcaggggtctgaggtctgaaggaatccagctaacccccatttcagatagggaaggtgaggggcagagtggggtagacactttcctgaggtcttgcagccactcatgcagccactcagaggtcagaaaatatggcctcctatccccagatgaggctggaagctacggaagcccagaaggccctacggagacggggcatgggaatggggcatgggaatggggcatggggatgggagtcttatcctgccccagcccaccaggatgctggttaggctccccctagcccttgccgacctctccctcctaggcccttgcagtcccgtttatttctcccatacagccttgtgacaccgaggtaaaagtgtatgtgtgtgcacagggccatgtgtgcgagcacgtgtgcattcctgcatatgtgtgctgcgtccgtgacatgcatgtgcaggagtgcagtatccactgccgtgtgtgtgcatgtgtgcacatgcccctggccttgtgtgtatgaacttgtggggcttgtgcatgtgtatgtgcaagcgtccacgtgtgtgcgtgtgtggggtgccccatcctggggaaggtgtatctgcaggatgctcgtgctaggaagctcagggccatcattttccaggcctgctctttccagccaggctcctcatgacccctggaaggagactgatgtccctttatggcatttgcagcctccagccaggctggaacctcccttgttgtcctgcccacatattctgttctccccacactggccttgcctttccagccctgccagtgctgttccctgcccctctgtgtgtttatagggagccaaggcccacactggaagggcacatcctctccagtccccacactgtcccttaaggcagctgtgacctggtcctcccactccctgcattttgcagatgggaaaactgaggttcaggaggcagaatgactggcccaagatctcaagccgttgagctggaatctgagcccaggtttggcaactgcccctcctggcgcttccccttctacacattttcttctacacttccagaaagtcttcctggttttcctcctcacccacactccatgaatcagcctctgctcagaactctgacctgcatcacagcccccgcaggcccgcccatggggatgggagtcttatcctgccccagcccaccaggatccccacttgggtcagtgccttacccgtcgctcaaactcttctccttgctgcacctcccgcgggtagccatcaatcaggaagcctttggaagtattgactttggccaccatggcatcccggagcatgtccaacactgtctcctggggcacagcaaaggaggaaggggccatgagcctctcctccccatcccttctcccagcctctgctcacgctgctcctgccacctgaaatgccctctccccaacacaaatgtcccaaacaagcctccccctccaggaagcttcctcggaattgtggagacctggactgagtgaatgaatgaatgaatgatgcattcactcaacagtattcactgagaccctccttccagccaggtgctgtcctgggtcccgaggacacggccatggaccaattaggccttccctgccctggggagctcaggggctggtgaggggacagacacattccacagatgatttctccatttctaagcatggcacaggttgtacgggcagagaagtggggcttctggagtagaaaattggggggggaggtcttaggccaaatctggggagttagggaagtctgaaagctgaagaggaaagaatattccaggctggaaggagtatggctagtctgaggggacagaggccagggtggctgaaggatggagggaagggagagagttgggggcagggcagagtcctgcaaggtcttgggagcttctggaaggaactttctgtccagggcaatggggaaccacagaagggtttggagccgggggcggttacggtcagctttgcctgtgtgccgtgggctttgctgctggtgggacacccactcagggctactgtcatcccctgcctctcaccccaccagggcccactcaccagtggaaccagctgccccttctccatgatttccgacagcttcttgcccctggccgagcctgagctgacctcggaccgcaggaggtccccggtggagaggtgggtgtagccatacttctgcacgatcttctcacactgggtgcccttccctgagccaggcccacctgcaaacgcccacccattcataaaccccgagacacagggtcccaggaggaacaggggctgccagggtctcccagagagggaggggcagagcccagggtgcagccccaggcccgggctccctccagtgccagtgaagacccttgctgcaccacccgcctgcccgcaactcacccaccacaaagatgatcttggttttcttcagcttctctgcgggagagaaaaggggagcagggctcagtcactcgctggacccacagccagaggcacctctggagtcccaggcctgtgctgggccccaggcggagggacagacaccgctggcgctcctgtcagggaggcagacaagtcacagcccagagtcagcagggatgtgagtgagctcggagcctgggagaggtcagggaagagagggtgctccaggcagccagacgggcagaggcaaaagcctaaaggctaagtactctccacacagccagcgggctgggccgccagccctcatggcgcctccctgtgggtgcctggaccccggggccggtcacctctggctctcagatcgtcttctctgcgggggtcactcgaggagcagcagcccatggtcccgtcctgccgtgtctcctgtgcaccctgcccttcccctctcaggccctgggccggcccatcacccgcctcccccggcagtgggggcttagcaaccacaacatatgttgccatggagacagttgccggggtggagggctgtggtgggcatgtggaactcttgcccagagagggcggtgagcttggctccaacctctgtctcgtcccgcctgctgttagatcccagcaaggccacagccccactgggcagagggaaactgagctcgagagagggaaggcctgctcaagggatgtcagaaccaaaaccagaacccaagctccccactgggctttcaggctcccccgcttcccagggaaatagaggaccaggctgtatcccaccttgctgtgtgacttaggaaaggcctgcccctctctggttctctgccccttccccagggaggaggtgggctgggcggctcccaggggccctcccagccataaggctggagccctacaggagctgtcaagaagggctcctcctgtgggcccctatcccgggggtgcagtggccgcagccctatggctgttgatatttggagctcaggcagagcagcagcagcagcagcagcaggcccgctgggtgtctttaagagctgcccaggccaaggcacagtgccaggaactggacggatggtgctgccagcagctgagggcgggcccgttctggactctctgcctgcccgtgtctccctctaagtcccagcccataggaactaggagggtccaagacttcctcaaggcccaccctcactggatgatagggaaactgagtcccggagaggtacggggaattgccttgtcctcattagacctggtgttttgtgtatctgtggcctctccatggggcagggtctcagctctataaacccagcatagggggtgtgcgctggggccctcaggagccttggggaggcctcgtcacgtctaaaattaatcttggagctggcacatcccgtgagaggccagaggaggatactggaggctcccagccaggccccctccggcagccccagagcctcctccaacccctcccagaatgtctccctgagagcgcacccccttaatagtcaggcacactgaggcccaggcaatgggcaaaaggagaggaggctcataccttccatcctgccgaggtcccgggagccgtgtcagtgctctgtaagacaagggcacaggttggggagggattttcctcctcaccctgactcaccttccactaagccacacccaaggcaactggtgtgtgccaggcccgacatgcagtctgagggcagagggggctgctgggggcagggaaggcccaggaccccttccctgagaaagccaccttgggaaagtgaccttggaaaagtcacctttcctctctggcctccatggcctcacctgtcacagaagggcagtagccccctcccatccacctgggttcccgctggaggggctgggacagtgaggatggcaccgagggacataaacagcggccacacaactgcagagctgctcccctcgaaactcccagaaaacagggcgcagggccagcgtctgcccagacaccttgacaacgctccccagggccagagggaagctgccaggaggtgggaggtggccaggaactatgtgtgtctgggatgaggtttggatggggatcctctaagggacagaggcctggggtgaaggaatctacaggagccgctcgcatgaacacagccctttacagttgtcaaagtgaggcggtcccaggctcttcacctctacaggcccaacaaccagccccacgcatgtcccctgcacccccaccctttgaggacctggctttactgcccccaccttgccctcagcctgcccatgagcccaatcacacctgcgaccccaccctgtgctgccacagcccccaggacctcccctacctcgcccccctatctcagaactgccctctggacacctttggcctccacttcttcactcccagccaccagccctccccaaggccactcgcaaccaccacagccacactcccctccagccttgacctccagccagcgaccccacccgcaccgggacctccacccaaggcacccacaccaccctctctacttggcttcaggctccaaggacccccatccctgtgcaggcagcccaggcctttctctccagccccagacatccatgcccccgagacaggccccagaagccccacaggcttctcaggctctgaacagccctccccaagtcccagctccaggcccctatggccaagccacaggctgagtcagtgtgaaggctcctctctcctctccacagccctgcacacccactgcccaaccctcccctccccaggctctctccgtctgtctcctcaccactatgtcctgtgctaagtaaggggcctgggccactgcccccgcctccacatgggccttgaagcctccacaccctgccacgcaatttgcaggattttctctggcaagtatcagaccacatcacacacccgcttacaaccttgcatgtgtggccctctcggctcccagacaaagcctgggccccttgacatagtggataggtcccggtgagctgacctctgctgccctctgcaaccctatcagctgccactggcagatgttgtacccaatgcctggatgcctttccccaccttgctattgtgtgggactcagctcaggtgccacctccttcaggaagccttcctggactctgccctccactcccacactggcaggtgcctcctggaaacctgccctgcactgcacaaccacgctgtactgggcccctcttctgtgctgcgggcctgggatcccattgactgggcctggcatgggctgagcacagggctggggagcctcgttccatcctcactgccatcttgggaggaaactgaggcatggggaggaggacagactggttcgagggccagctagggtccaactcggccctgagtttctgctacgctgggcctggcacccagtagcagctgaagtggctttgctgatgcccctgctgccccaggcaggagtggcagccacttttcctgctgagtgtgcttcagcgggggtaggagctgccaagtgcccctcagcagctgcccatgggagggggagcgtcctgggccagggacaaccacagtgaagccctgagaagtggcctcgaccccgccctgccccgcccccctcctggtaatctaagccccctccgccctgatggcacctgccacttccttgatccaaaataacttgggtcgtgaggaggcctcacagaggacaggggtctaggatggagttgggttacgggctaagcacccaggccttataaggcccctgggtcaaggccccagcgactcctaatatgactggatggtctgctaaggggcctgtggggccgaagcccagagggacggtgacttaaccccaatcacaagacaaggccaaggcaagcccaggtctcccagcttctgacccaacgtagtcggttcccagtgggtggcaactgactagggttcgaatcccagctccatcactcagctgtgtgaccttgggcagttggtgtcccctctctgggcctgtcctgctgctgctgaggagtaccaggcggccactgagcagtgctgtgggaaggccccaagcgctggccctggtcaggaggctagggcaagctctgagcatccagggggtgttctccaatgcacccagcactagaagtggagtgacacgatagccctacggagcacagaggctgcccctgtccaggtcctctggggcagggagccaggccacagctctccctctctgggcccaagctgggacatgccaagggcagtgacctggagccccgggagtgccagccagaacaaaggggtgactatctcggaggctggaaggggctgcaacacacacaaacacacacgcacacacacgcacggatccacaaaggcacaggcagcgaggcacagatccccagcgcccggggaacacagccacgcaaacacacacggatcacaaccacggatacacagccgcacagcccccagggagccccgcaccagcacgcccccgccctcccccggtgccgctgcccctccccgcagaggcgcccccccagacacgcgcgggcacgcactgacctggggaggggtgcgggtgggcgccggggccagtgcgtgccctgcccgtcctcgcggcggccggcaaaggcgactatttataaggctgtcagcgcgcggcatgccgggagccggcgttcccgaaggcagggagggcgggaaggagggagggagagcggaccagggaccgggaagcggggcgggaccgagcccgagcccgggtgcgcggcgacaccgcacccggcaccgtgtgccccgcaccgtggacccccaggtggctgtgcccacacacgcgaactacactttacagtttgccaagagttttccattgcgataccccgactgtgctcaaggtacactccagggtacaaggccaggctttccctatgatagctggagaaactgaggctcagagaagagcggctctttccgcaaaatcccacagcgcattggtgccagagagaggccagaccagggagcgagagggctgaggcatcgactcaggggctttgctggccacagtccccaagcccgccctcagagcctgcccagaggccctggccgagacccacctgggactcctcttcccctgttgggagggacccttcgagctcctctgggactggaacccgccaggaccccaaagaccacccagtaaggtagaagattatagaaaaccagccctgctcccctggagttgcccgggacattcagaaggctgtggatagccagagaggggatttgcggtcttgataagaagaatagctcccataatgagcactcactgtgctaagcagcagactccagccgcatctgtgaatccttagacacagcagagaacgggaggcgagcatgtcaaataccttgcgggaggttccctggtagaaagccacgtgtttatccagcgttttgcagggagactggcacatagtagtaggtgctcagtgatgtagccgggcagggatgggagcccaggcagcagccccagatggtgaggtgggttgaacttggaatttgtattataggccctagggagccataggaggtatttgagcaagagagtgagactaccaggagattgagaccaccttcagtggtggtgcctcagcaaccacagcagccaggagaccaggaggcctgggtctctgctacctgtgatgtcagataagtccttacttcttgggaccttagtttccccatctgtgggggggcaggtgcagtggggtcagaggtgttgcattagaagctgtttgaaaggccctctcaagggtgtgtgcattggcacctttggggaaagcaattgacaaagtaaatcaaaatttcaaatggaccgggcataatggtcactcctgttaaccccaccacttcaggaggacgaggtgggaggatcacttgagctcacttgagcccaggaattctaacaccagcctgggaaacataacgagatcccgtctctaaaaataaaacacacacacacacacacacacacacacacacacagtcttcaaatgcgcccttctactttaagaaatttgtttcaaggaaacatgtgggcacaaatttgcataggaaagttttaaagtgccagcagggactcactgggatgatggcacagccacggtgggtgaggagttagcaactt

SEQ ID NO: 22 - DNA, 371742 bp, Homo sapiens
  source 1..371742: mol_type = genomic DNA
cgcttgaaccctggaggtggaggttacagtgagctgagattgcaccattgcactccagcctgggcaacaagagtgaaactctgcctcaaaaaaaaaaaaaaaaaaaaaaagaaaaaagaaaaaaagagaaaatatatgtgagcaccagagctcaacattaggagcatttctgagatttggagctattcaacaatggaagttcctggcacacacatcaggtattcacaataccctttctcaggtgtttggtcactgctagtgagccgcctggatcagtgtttcccaaatggcagtcatttgcatctttgcttttcttttgggggcgggggggtaatatcctgtaccagatttttgaaaactgacattaaaaatacatgtttaaaatgtgcaaagtgcactaaagtgcactggatgtattttttattcatgtatatacttttgttatctatcacccaggtcaaaatacagaaccagcaccccagagggttccctcctcctccttcccagccaataatcttctcctcctacctaaccgctgttcttacttcaatcactatcaactagttttacacgttcttcaactgcatataaattgtctcagttttttacttaacacttttcttgaagtgctttcgttttttgccactttttatttgacctaagaaataacattaatgaaacagtggtttgacgtgataggcatttccctcctaatgcgcactaaaaacacttaactatttgaaaaaagaagtttcttcgtgtaccaactaatatattctccgccctgtctccagaaaccgcccttcctctgtgggccggtggttaccggcaccattggtacacggaccacattttgtttcccaaagcaaccagatgatttttgaggtcctttgcagctcgaacacggaatgactttgtggtgatcgagtagccagaagttcacggaatgcactgtcacaattgtgattccgccatagcgccgtgcatccatccaacacttgtttaatacctatatttaatacctaataccttagacggtcctaggctgtggacacagaagactaaaccccacttcctgagttgaagtgggggaaatagaggagtaaatcatttcacgatgtgtggttaagtgctgcagctcaggtaaccaccagtacacagaggaagggcggtttctggagacagggcggagaggagaccgtgggtgggcatttcccagagcagcctctgccagccaccctactttgatcactttgccgccgagcagcagcggcggtcaacctcagcctcccttagcaacctgagtgccccgtccaggagccttactattggtctcatgcagcgagatgggcagttctgccgtgcaatcccagctcgcagttcttgctccgcgtgtactcacgggaggactcgcaggcgttaccgccttcccgcgtgccccgcccaccctcccgagcgtctttcggcgcatgcgcggactggagctgtgtgcagggccagcgcggagcccgagcagccgcggtgaagcgcctgtgctctgccgagactgccgtgcccattgctcgcctcggtcgccgccgctttagccgcctccgggggagcggccgcctattgtctttctccgcggcgaaggtgaagagttgtcccagctcggcccgcgggggagccccgggagccgcacggtgagagcgcaacttagttggcggagttgggggaagttttgtgatttgtgggtcggggcgcggagcgcggccagtcccctgcggttgctcggtggggcgggccccggaggaggggcgggggctgcgggggtttcgggggcgggctggacagacgggtcgccgggcggcgccgggacctcaggtctgcggacccctcctccctgcgcatcgcccttctcccgcattgtctgcttggggctcggcgcgcctcccactccgcagcccaacttagaggccgtcgccgctttccgggtggggggcgcgcccggccgccgatgctacctcaggcgctccgcccccagcgaggccccgaatccttgccccgggtccccgggtcggcgccgccggggcgggctcactcctcccctggggcgggcggccgcggtgtggagtccccgccgtggagtccgcgccgtgaacaagtgctgcgggcgcgagggagcggctccccggggtcgacgcggacggtaaacacgtcgggccgcgcctgcctgtcggtgcctctccgcggcttctcgggggtgcggcccagctgacccgcgcgggtcgcaggcgagcggcccaggagacccgtgcggtccccacgcgctctgggacccgtgcagccagccggctcagcttgcagctatactttgataccaaacaaaacttttttttttttttttggtaaatacggtttactgctttttttttttttttttttttgcaaagccacgaagtatgtgaagttgaaaaaaggaaaaaccctaaaactttttaaaaaaaaatcaagaaagggggtagataggtttgttttgttttggaaatagttcttatagcagagtgataccgtcccatttaattttctagatcccggaattcacaatgaaaattggattgagcggtattttggtgttcattctttgctaatgacactccttaatgaagttatttggagagtttattgcttcagtacagtaaaaaccagtgtgcctttttttttgttagtagtcccccccacaacaagtgttttatttttagaagaagcattttcttcagtttttctgaactgttggattgcgcagatgaggacaaacggtgcagttcttgaaaggtcattattggcaagtttgtgaagaagctaagatcagttgagataaatcattgttactattcttgtattctgtcgtggactcttggggatttgcaggctgcattaagtacaagttttgtcaagtttgggtgcacatattacacttaatttggtttgtgtggcttattatatgaacatgattctgtttcagttccccagatggaactagcttaaatgtctgtcattcatagtggagcaaaatggccagagtgtcatttattgttaacttcagttgtattcctttaccatctgctaaatgaaaaagaaaaatttgagaaatactgtgtgtgtcagtttgctcagagtgatttctcgtgctaagtgagtcctgtggagaagcgttcctgggcttttctggtttggtgggccttgtgttataaaaccaattttcttcacctgatgaagctaaagacaaattttcttcaggtacagccattgcacttttaaattacagagccgcttttaggattcacagtactcgctccatggcttcccttcctggttgtgtggttttgtgtgtgtgattgtggggaaggaggttgacagaggttggaagggattgtcagggagggacataatgtaagcaagtactacttacaacatgacgtgacgagtgcactagttgctttccttctctgggcggtgatggcatgttatactgtaggtactattgttttaggatttctcacacttcttttgccttgactaaatggtaactgcacacatactatactataaatggactcctcctctagtcctttaactccttgagggctgtgatagaccttatttagctttttaccctctttgccggtagtcttaacatagtgcaggcacggtacgtgtttgaattgggtaaattatttttactgcctagtggtagctagcgtacacaggagagagccactaactggggacctgtccagaatgacagttcacttgcagatctgtgatgacatttactttaaaaggatttctaacctttttttaatctgtcaattattttttgaaaagaagtgggtttaactagcgctctaaggatttcaacaagaggttccaatttagaaatcagcccccccctttttgtgaaattattattgtttttttttagagtcggaatcttcactgttgcccagttgtctctaactcctggacccaagccatcctcccacctcagcctcccacagtgttggaattacagacgtgagccactccacccagccagtgaaattattaaaattgttggacaaatctagtcacaactctccctccattgtgaaattggaaaaaaattagaaattttagaaaaaagtacaccctttggaactaggtagcgttcagatctccacacttccattgactagttgcatagcctctcagagcttcagtttcctactccataagcgttagtaacagtgttcttaggaatcagtgaaactatgtgaggtacttaactacagtatctaacatggagtaggcagctattacctagtagctgtaatgataataattttggtacatttttacatgacttaagcattcttaaaagtctgatgcttctgagtgtagaggtttagctatttctttcataaagaaggggccttgagacttgtgagtcttatcgaagtctatttcttcaaaggtgccagatgaactgaaggataatggaaacaatagcgagtttatcttctcagtcacctgtgagtcttcctttgagagtgggacttgcagagtggcttggtagggtagagctctttgtgactatgctatttgggcaacagtgagagatggattgttttcagtacatcagtcataagaggatatgagttccaactttattttaccttagtcttggcaaataagtgtggattgtgtctgtatttctcaaacttgtttaaggtagagctggactgggtgttaacagtgttagttcagtacagagacatgagcaaatcactcacttcctcttcaagataacactttaaaggtgacaccatttacagaagaaggcagtgatttaaatcagttatactagcatagtttagaatacttacactacctagatggagtagatacattctagaaatatttacctgttaaggacatttctttagattttattccatctttccattagttttctgatgaagagattatagtaaacctttaaaaattatatttgatcaaacttacagattgaggataaacctttaaaaattacagttggtcacacttacagattgagggtaaaaacattcctgacaaagctaggcgaagaaagttggacttttgatgttcccttcttttaaagttaacatctggcacttgaatagacttggttattactgatggggacaggcatccatttggaagtagcttccctctctctttcccaggttaggctgtcttactgctgtaaatggggagagacgagaaagctgtgggtggaagaaagtttgtttcatagcctggcgcagtggctcacgcctgtaatcccagcactttgggaggctgaggcgggcggatcacttgaggtcaggagttcaagaccagcctggccaacatggtgaaaccacatctctactaaaaatacaaaaactagcccggcagggtggcaggtgcctgtaatcccagctacttgggaggctgaggcaggagaatcgcttgaacccgggaggtggaggttgcaatgagccgagatcatgccactgtgctccagtctgggcgacagagcgagactccgtctgaaaaaaaaaaaaaaaaaggtttgtttcatgcatctgtcctcactggtcagtggaagaaagtttgtttcctgcgtttgtcctcatatttatagttttctcgtccacctacaagttgattgtgacgttatgaatagaagatgaatggataatgtgtttttgtcagaccttgctgtaaggatggacctggtactgaaataccgtgattgtatgaacatttgtgtggggcaatgctgtgttcagtgcctggggaatgtggatatcagtgtgtttgtatgatatgggtgctagtatgggagagaaggaaaacgtgtgaggtttttgaccatttatgtcactctgtaagctcttctctggctactttggtgctatagtagcagagttgagtagttacaacagagaccatgtgatctgcaaagcagaaaatatttactatctgggcttttacagaagtttgctgaccctttttctacataaccaactgcagttattcacaacaagaaagattaacgttaattctataatattattcaatacctattcaactttctctatttgtctcccaaatatcttttatagttgattaagaaaaattttggacagagtaaaattaaagttcactcagcacatcattatgtctctttagtctctattttttcattctttaattattcatatgtatagtttacattcactaaaattccgccattttagtgtaacattctctgagttttgacaggtgtatacattcatatatccactgctgcaaacaggacagtcccttcatcctccagaattcttctgagcccttttgtactcaaccggttctctacccccagactctggaaattgctgatctgttttctgtctccatggttttttgccttttcaagaatgttgtaaaaatggaatcacacggaatgtagcctttttattcatttgcccaatgactaatgatattaagtatcttttcatctgattatttgtcattctttgatgtcaattcaaaatcttttgcttaaaaaatgagtttttgtatatactttggaatcaaatacatgatttgcagatattttctcctagtctgtttttacttgtcttaataatgtctttttttgtttgtttgtttcgagatggagtttggctctgtcacctaggctggagtacagtggtgagatcttggctcactgcaacgtctgcctcctgggttcaagtgattctcctgccttaacctcccgagtagctgggattacaggcacacaccaccacacccagctaatttttgtattttagtagagatggggcttttccatgttggccaggctgatcttgaactcctaacctcaagtgatctgcctgcctcggcctcccaaagtgctgggattacaggcgcgagccactgtgtctggccttcttgtcttaataatgtcttttgaagagcagaagttcttaatttttatgatatccagtgtttttttgtttttttgttttttccctgagtggatcatgcttttggtataatagtttagaaatctttgcctaacttaagagctcaaagactttcccctatatttcctcctacaagttattatttttttttttagagatggagtctcactctgtcatccaggctggcgtgagtgagatcttgttcactggaatctccgcctcccgggttcaagtgattctcctgcctcagcctcctgagtagctgggattacaggcacccaccaccatgcctaatttttgtatttttactagtgatggggtttcaccatgttgaccagggtggtctgaactcctgacctcaagtgagccacccaccgcagcctcccaaagtgctgggattacaggcgtgagctattgtgcccggctcgcctagaagttttatcatttaaaattttatatttacatttattatctgctttgatttaattttcctaaatggtgcaaggtatgcattgagtttatttttttgtggatggatttacaatttttccagcaacagtttttgaaaagactgtcctttctctgttgattacctttgtgcctttttttttttgcaagttgatcataaatgtgtggttttgtttctggattctctctcctattccattgatctgtgtctttcatttctctatcacctcactgttgattactgtcaccttagagtaagttttaaaatcaggtagtgtgagttatcttattatttttcagaattgttttttgggtattttagttgcattgccttttgtgcatattttagattcatcttgctgttatccacaagtcctgctgggtttttctttttcttttttttcttttttaagatgaggtctcagccgggtgtggtggctcacgcctgtaatcctagcactttggaggctgaggcgggtggatcacctgagatcaggagttcgagaccagcctggctgacatggcaaaaccccgtctctactaaaaaatacaaaaaatagctgggcgtggtggtgggcgcctgtaatcccagctacttgggaggctgagacaggagaattgctttagcccgggagatggaggttacagtgagccgacattgcgccactttactccagcctgggtgatagaacgagagtccgtcttaaaaaaacaaaaaaagatagggtctcactcagttgtccagtgtggaatgcagtggtaggataaccactcactgcagccttgatctcctgggcccaagcgattctcccacgtcagcctcccaagtagttgggatcacagtcatgcactacctggctaatttttttatttttgtagagacagagtctctctatgttgcccaggctggcctcaaactcccgggatgaagtgatcctcccactgtggcctcccaaagtgtagggattacaggcatgacccaccatgcccagcctgctgtggtttttgattggcattgtgttgaagctggaaatcagttagggggcaattgacattttaataatgagccatgaacatggtatatctatttagaccttagatttttgattagtgttttgtagtttttagcaattggatcttgcatgtgttttgtaatcttatacatgtatttcatgtattctggtgttgttgtgaatgatacttctcaatttccagttgctcattgctggtatatagaaagatcattttatattatttgctgaccttggatcctacacccttgctaaactcatttttagtaatagaagctttttttgtagatttttggaattttctgcatagacattattgtcattggcaaataagggcagtttgatttcttcgttttcactttgtatactttcatttcctttttttttttttgagatagagactcgctctgtcacccaggctggagtgcagtggtgcgatctcagctcactgcaacctgtggccccccaggttcaagtgattctcgtgcctcagcctcctaagtagctgggattacaggtgcatgttgtcatgcccggctaatttttgtatttttttttttttaagtggagactgggtttcaccatgttggccaggctggtctcaaactcctgaccacaagtgatccgccagcctcagcctcccaaagtgctaggattacaggcgtgagctacagcgctgggcgtgatttctttttgttactttgctgaactatctaggaccctcagtgtaatgtgtaataggagttttacaagtggacatcctttcctttttcctgatgttagaggggaaaacactgagtgtttgaccattaatatgatggtagccataggtgtttgtttttgtagatgtcttttatcaagttgaggaaattgtcttctatgtttagtttgctgagagtttttatcatgaatagatattgaatgttgtcaaaggtttttctgtatttattgacataatcatatgttttttcttctttagtctggtgtaatacgttgaaatagctttgcattcttgtgataatactcatttagtcgtgatgtattattttttacatgtctttgggttccatttgctactgaatctttttttatttcttccatttgtttcccgttatgttcattttaaaaataggttcttgatcatatgtataatattcatgatagttgttgagtccttatctgttaaatgtcagatgtctccttgggggtaaagttatttcaaacacaagaaccattgctttaaagagtatcatactttgttttggcaagttaagttgccaaacttatgtgtgtaagttgcttgttacaccccattactaaggcatgaagctcctgtagttttcattgaagaattgggctctccttgaggactctattctggcagttgagaacacaaatgtctcccagccctgtgtgaactttggagatcatttagcttacagttcctgggtgattctttgcatgccctcatgtatttttacaatatgcatgcttggcttactactgggtgtgagactcatggggcctctatgctgatttctggagctcctttttcatacagctccctcctcttctctcgtactctgcaattttcaaactccttagccttcccaagctatgtttgttttctaaacttgacaaggctgtcatgttgtgcttgatcctcctcattgcaccatggtctagaaggtacctccagccagaaagctggggcgattttagggcttatctcatttgttcccttctctttgggactgcagttctgtgctacctgttgttcaggctctaaaggatgctgcctcatgcattttgtccacttttctagtagttagggaggatgccaggataaatctggatccagttactccgtcatggttagcagctgaagtcctttgggtgagtatgctttgttggtggttcttaaaatttcattacaggattctcaaaatctttgggggtataaataacaaagaagtatttgttgactatcttctgacagtagctcagccattgctttgtgggaaatacaaaacaatgtaggtatcttttagttgaagaggcacatggtacatacctaagattaatcaaagaaatgaattgctatggtgatgaacagaaagagaaggatcactataatctattattttctgtccccccgtgggggagtcttccagtgaaaagcagaaaacctgctagacagattctaaaagatctgtaacacttgtgatctggtgttttcatgtagaaatgcttgcttttgcgtttttgtttcttagcatatatgctttatgtcgcaagttgtagtgagtcagtgggtagagtgctggctctttcaggtgcatttgctatttatttactatgcagctttaggtaagttatttgtctctgaaatctaatcttctcttttctcttggcaaatggttatatgacataccttgtagggttgtttgttaattttttcaagtatcttttgtttgtcaggcacggttctaggtaatgggaattcagtgacatctgtagttgctgccgttaatctatatcctattgagggaagtagaaaataaacgagtgaacaaacaattgcagtcatgtctggtggtgatgattctaggaaggatatgaagagtattagcagagattggggaggtcagacaaggccttactgaggaggtgagatttgaacagacctgaagaaagtcaagggagcaagtcacatgaagattcagaggaagtatggaaggaacatcaagtgcaaaggacctgagatgggagaatgaacagggagcctggtgtggctggaatgggtgagaaagagcgtgaggagataaggtttgtatgtgtagccagagaccagatcaaataggctcttaggtatggtgggaaacagctgaaggatttgagcaaggcatgacaaggttgatttaggctttaaaaactttactcttggcatagggagcagtagtggaaacggagagactagttaagagatttgcagtcgttcaggctagagaagatggtggcttggattagggtggtagcagcgaaagtggtgagaagcggtttgaatccatatacgctgaaaatagaactataggattacttacagattggaaaaaggttctaaaggaaagaaagaaattaaggaggattcctaggtgttttacctgaacaactgggtaaatggggaagatgtggaatcagtttgctgagaggttgaaattgtgatttccctgttgacatgctaagtttgagatctgtgaaatttttaagtgaaggtatcagtaagcatttggatatacagttctggagttcagtgatggtctggactgggtgtatgaattagagaattgtagatagagaagggagagtgggaggttttagtgggaattagggatatataaagctccataataggggctcatggcatagtagttaataatcatgacagtcataaaacaaccaccactatgtatagtaactaaaggaaggctagatatgaatgaaggaagatggtagtgacctaaaacaattatcttgcatattatatcagaattagttaggattctaaacatgctgaaaacttttcttctctaagcatgataaaaatattagtgaactctattttccatttgtagtctgtaaggatattggtgatagtggaaagataatgacgtttttatgtgatgctagtgtattatttgaatgtacttcacatacacatatacgaagatagtctggaaggaggctactgcaaagtagatgagggtaacttttgatcttttgattttctgcagagtgtatatttgtctttattcttttcttttcttttttttttttttttaagacagggtctcactcctttgaccaggctggagtgcagtggcgcgatctcggctcactgcaacctctcccttctgggctcaagtgagtctcccaccttagcctccccagcagctgggaccaccggtgtgcaccaccacgtccagctaatttttgtactttttgtagaggtggtgttttgccaggttgtccaggctgttcctgaactcttagactcaagcgatccacccaccttggcctcccaaagtgctgggatcataggtgtgagctattgcacctggcctccttattctttttttttgagacagagtcttgctttgtcacccaggctggagtgcagcggtgcgatctcggctcactgcaacctccgtctcccaggttcaagcaattctcctgcctcagcctcccgagtagctgggactgtaggcatgtgccaccatacctggctaatttttgtatttttagtagagatgaggtttcaccatgttggccaggctgttcttgaactcctgacctcgtgatccacccacctccgcttcccaaagtgctgggattacaggcgtgagtcaccatgcccggctctattcttattcttaataaaaggagttaataatattttttgaggttgggctcagttggtgagtttctagggtagtgggtttcatttgtttgtggttgctgatattacttattccatttttttttttactatgtatagtctattgtcttaaaaatgtgagcccttaataatttttttttttttttttttttgagatggagtctcgctctgtcgccaaggctggagtgcagtggcgctatctcggctcactgcaacctctgcctcccaggttcaagtgattctcctgcctcagcctcctgagtagctgggactacaggcgtgcaccaccacgcccggctaatttttgtatttttagtagagacagggtttcaccatgttggccagtatggtcttgatctcctgaccttgcgatccacccgccttggcctcccaaagtgctgggattacagaataatcttaatcgtaaatgggaatcagttaagagtattttctttcttttttttgttaagaaatgaggttttgccgtgttgcctaggctggacttgaactcttgggtttaagtggtcctcccactccagccttcctagttgctgtgactataggcacacgccactgcacctggctctgggtggttttgaaatgagtccataacagttcctggaaaaattgttagcacatactcttcccaccaggctaatcgtggcaccattttgttgaaagggtactttatgttgcactgtggtgggcagatctcttcagaataattgaactgagcatgaagttgttttgttttaaaatctgaattacaccatcagcattaacttagatttttagaagtatcctttttcccaggtgatagctgtcctaaaggtggtggatatgacaggggcttttgacaaatttggcattttcagtaattcatgaatcacttctaaaaacatactcagtgatttgggtggtatctgtaaattaatctatcatccttgtcttggcatttgagttctgccttgtctaagtgggtgtgtttctggagtgggagaagggaggtccgttgtgacattgcatggaaataatttcttttacctttaacaagctggaagaaaatggtttttggatgctttgtacacagagtgtacatcctcttggatgctttgtacacagagcggctgggctcagaatagaaaggaactatagatgagactttgcagtttgggagttatttggggaaaaaatacggtaacaagagttgggaagtagagttctaagtgttcatttgatcacatgaagccttgggggctggctgaggtgcttcctctcttcagggattaaaggcatgcatgggtcagtgggcagtaatagccaaagcttttgcttgggcattcctgccaaaatagtgctgtgtgtatgtttagagcatagaatagtgtgtatgtccagtctagagaggttttttgaggtcattttctataaggtgtttttgaaaaagtaaagttactataaagggaagaagaaacttttgtgtgtttacctacgtgttatgttatctacattctcttaattccttacagtaatcctataagacagatattattctttctcccttttttgatgaaaaaactagggtttagagatttaagtttgcttctctcaagtcaatgaactacaattttgatctgggacattgtgactacaaacataactctagttttattatatatgccataagtcacatttttttcactttgatgtaattatatccaaagtagctagtttaaaattccatcttgttcttggtgtaaatagaaaatcattgattgtggtctgctcttaaagttttcctagaattcttaaaaacatgctaggcttccatgtttgtgccttgaaagtagcagaaacttgccaatagaattgtggaactgtattttccttcacatacagaagctttgtggatggacattaataattaacatttacacatttgttcacatcttcaaagtgttttacaaacatttaattagttcatgtgtaaactatataggaagttgaaaaaccagttttttaggttcattttagtagtactgaagtgttagggggagaaggagtaagcaagccctcagtaagaaaaatacaggtatgcaccatgaagttctaaacatcttttcttacctgcctagctttcagcccagtttggctcatatcaaacatgttttttgggtgtatatcttctctgtaatacaggggagtggattatgtggacccaacagaagacagggtggaatggttggggaaagacctgggtcatgtaatgcaactttctcttccgtagtcccttaaatgtgaattgtccttgattcatccctttgagcattttgaaggccaggatgttgttggagcagagactctggcaaatgaatggagcatgcatgttaatttctagggaaaaaatcttttatttttcactcttgatttaggaaataatagctctataactagatactttgctagtttcctcacaactgcttgtcacctgattccatctcctctcctcccaccccctggtaaaatggctttaacttggcaaggtttgtagttggaaggagacagtagtcccaatttagctgggttctgtcacataattgactgtgtgaccttgagcaggtaggttactgctcttttgcctttgagttcttttgttctgtgaaatggtatttgctgactcacctttcactgagtcctagaaggatggccagagaaagatataaaacttagactcttggacatgaaatgggacagaggttattttcacattagtgaggattcttcagagttgcaacgactcctttctactttgcttggagtaactaattttcttactattcttgtcaacctcattactataaacactttttctaatacagtacagtaaatagaattatttgataaatagtgtgtctgggtaatttcctaagacaggacatgcaagttccttttaatcagtgcttatagcccattgttcagaggaaccgttcattgttcagaagaatctttgtgtagataaccttgccagagaaaccttacttagtatgtgatctcagaaaggagaagaattctgatagcttggcatgtatatttaattaaatttttataatgaatgagaatctgttcttttaatggggctgtataagaatggccctgaacttttgcctctatccaatagtgttgtttttcaagtctttctttttttctccatccctttccttctcttcttgaaatctgaaaatttaaaggtgggatgagttggctgtggctgttgaacctctttgtaacatgaaatacacccaggtttaaacttatctttctgttctgccaagatttatggtaacttggaaggaatattttacagccggacattgagtaatactatatatgaattatgaataattgagattggcttagttaagcggttaaagttactcttttatttgaaaggatatctgaaggcagtgtttatttatctttttgaaaagggagacttttcgataggacagattgtatgtataagacaagatagaagttttcttttggaaacctagctggtttccaaacaatccaataaatgattgtttttcctatttagattagggatttgagttgtactgtttttggttacctctttgatttttccgtattgtctttgcccagtgttcatttcctttccccggttaatctagtaggatgtactgtcagattgcccactgaatagatggggtaatgtaatatcacatgtctatctttcctcccagattataaacttcttgagggcaaattttatctgctttgtttattgctgtatccccagcaacaatggcacataatagttgcttctcaagaaatatatgggttgatggaaggatgaatgaatttttgactatacatacatacacacacacacacacacacacatacatatgcacacataacatacatgtatatattaaacttaataaaatctatcctgttgcgaataaatgaacagatgtttattttttcttttctagcatcagttttagtttgattttggtcagtttaaagcattccttttggggaaagagaagacatcatgttaaatggaagtttggtattgaccaagtttggtggtaaaatctatacagctcttgcctgatggttgtgcttggtccacgtagggctctgtcactttccgttttaacctcttcagcaacttcatcattggcatatggatggttgacctaagaatgtggtgcgtgatggctggcttaattaaaaaacaaaattatgattgtaaaacatgttcacagtagaacggtagaattgactcatatactcattacccagattctagcaagattttgctattctctacatgcattattttaaaaaaagctttgttttgatataattcatataccataaaattcacccatgctttactataatatgtttgtcctagttgtcctgaaagtcactacgaactattctttttagtgatttttaaatggtatttttactccaatgtataatactgtaaaccatgaaatgcctctgtaaaacaaggcacgataggtttccaggatatgaaacagacaactttaactcaaagcaaatgagtgctgagtagcctgttttcctttcagcagagtaattgcagaaataggactgcaaaccttttattaagcacttttatatgaaatttgaggtttctgtcaaattagacatggaaaattaaagctgcacaaattactgatctgtgcagtttttttgagtcctctcgtatgttagactttttttttttttttttttttaagataactgtttctcttaagtaccagcacaggaatgctatgatttatacataattatttttgttttcacgtcagtagtcttttgttccccccattgaatttggtgattcccccccgccccccgaggattattttttaaataatgcattcccaagtattttgacttttgtgaaagaaaatactttttaaggtaattgaatacctccataaatcttgtatttccttaataatttatttggcaatgtatttaaaaacagtgttgatatcttaaaagctttcatttgaaggcccaaaaacaactgatacattgtttttcatagcactttttgtaaatattatgtcctaagtgcatagattctttgaaatactcctctttcaccccctctgtggtaaagaattattttggctgctttgccaaaagtgcttgtggcagtctaaagatgatcactttattagttagctcactgggatatgtgcccataaatggagagttttctttcccgagctcaaataaaggtaatggttcatctgtgagatacctcgggactcaaatactaattcagaagaaaaattatatttattctctcccctcagccttgatgcatgttgaaatctgcggggacaagttcactaatataatagctgtcacttattgggaaccattattgatctattggtagctattcatctaagtgtcttatataggtcaggtcttatctctgcaaggaaggtatttttatgattttaccagaaaaggaaattgaagctcagagaaattaatagctaattttatatatacttcattcagcattttatttaaggcctgttgtatgtcaggcacactactgggcaccagggattgaggaataaacaaaataagatgtagtcactgcccttaaagcactcatgattttgtttcttgattgataggcagtaacaataatagtgataattgccatcatttattattactttccatttgccaagtgtagtagtaagtactctacaaacccttgtctcattttaatcctcataattctaatcctcacaaaatgtggaagtatccatattttatggatgaggagacagaggcccagagaggctggacttgctcagggtcacacagttagtatgtggctgagttcatacttgaacatggatcttactctagaacttatactctgctcagcattcctcattctggcgagagttgaaacgagtaatgatgtgaaagggacatcattgtgagctattattttggcagaactttatgtaactttgactttgccagtagatttatttttatggttaatctcttattctaggagtcatcagatcgttttcatgatttatgaaagacatttttaataagtcttatttttattacaacagtaatgtacagttcctctagaaatttaggaactatagtcccccaaaagtacacataaatgacactacctagagaaaattgttgggtataatttttctttccaaacttgaaaacttgtagagagagagtgtgtgtatgtacatatatacagcccatatgtggactagccatatgtggcgtattttatgtactcttgagcataaacaggttataaaacatttcatcaatgtacctttatatgatttcttttttgttgttgttgagacagagtctcactctgtcgcccaggccagagtgcagtggcgcaatctctactcagtgcaacctctgcctcccaggttcaagcaactctcctgcctcagcctcccgagtagctgggattacaggcacatgccaccacgcccggctaatttttggatttttagtagagatggggtttcaccatgttggccaggctggtcttgaactcctgacctcaagtgatccacgtgtttccgccagccacctttatatgatttcaagtaactgacatagttattttaatggctatatagtatttccttgtatgaacttaagtttatcttcagttcatttcctattatttgaataggttgtgtatcttttttccccatcacccttcctcctgcctctttcctctatgctattataaacattgctttgaaggacagccttatacatacatctgtgtgtccttgtttactttgttagagaaatggaattgttagggcaaatggtgtacatttcagcagctgttcatagatattgtcaagttgtctacagaaagcttttgtcatttatacttctactggcagaatatgacagttcctatttactatttccccataacttttagaaaacacgtttttaaagttttagatgcaggccgggcgcggtggctcacgcctgtaatcccagcactttgggaggccgaggcgggtggatcatgaggtcaggagatcgagaccatcctggctaacaaggtgaaaccccgtctctactaaaaatacaaaaaattagccgggcgcggtggcgggcgcctgtagtcccagctactcgggaggctgaggcaggagaatggcgtgaacccgggaagcggagcttgcagtgagccgagattgcgccactgcagtccgcagtccggcctgggcgacagagcgagactccgtctcaaaaaaaaaaaaaaaaaaaataaaaaaataaaaaaataaataaataaataaataaagttttagatgccataagataattactcatagaattactggattactggcaaccaaagaaaaaatgaaagaactctgtatttctaaaaggatatgaagaaactcacgaagcatcgttactgtcctcttaggtgctaaacgttaatctgagttctcaatattaaaagacagatggaggaaactttcaaataaagtcactgatatcatgttcctttggcttgttcttagttgtcggttcagattaactccagcaataaaacagggaagtatttgagataagatttagagatgctgaggagtaaggtcctcttctacacaaagagccctgtgaaagatgatctgtggccattctgttgcttatctaaatgcatgttagaattaatataacttatttatttatttatttcattattattttttctagagatggtgtctcgctgtgttgaccaggctggtctcctcaaactcttggcctcaagtgatcctcccacctgggcttcccaaagtgctgggattacaggcatgagccactgcgcctgactgttaaagcttttagttctgggccaggctcagtggctcacacttataatctcagcattttgagaggttgaggtgggaggatagcttgaagtcaggaggccaggagttcaggaccagcctgggcaacatagtgagagcctgtctctacaaaataaaaattaaaaaattagctgggtggtgatgcatgcctatagttgtagctacctgagaggctgaggcggaaggatcacttgagtccatgagttagaggttacagtgagctatgatcacactgcctttactccagcctgggtgacaaagcaagatcctgtctctaaaaaaaaaattaaaaaacaaaatttagttctgaaagtacaaatacgtataatccacatatgttcctcaaatcacagttacatattgacatcatggtttagataatcaagaaaacaagcaaattaaacattgaaactgtgttcttgactttaatgtaggcaaacctttttctctgagccaaagattagtcaactggtctcagctataataatgattttcaatcataatatttgtgaaggttttctgtattataagtaggaagaactagttgtataggaagttgtaagtcaggtagctgtgtaaggtgatctcttggcactgttgatacaccagcttgtctctgttttgttgaccattcttaggagtatcttgttgatattcagcctatttctggttacagagaaatagctgattaatcataatttagtagccatatatatatatatgtatatatatatatatattttttttttttaaacagagtatgttgctcaggctggggtgcagtggcacaatcttggcttactgcaacctccgcctcccggattcaagcgattctcctgcctcaacctcccaagtagctgggatcacatgtgtgtgtcaccatgcctggcttattttcatatttttattggagattgggttttaccatgttcgtcaagctgatctcaaactcctgacctcaggtgatccacctgccttggcctctcaaagtgctgggattatagacacgagccactgtgcccggcatattatatcactagatgtagaaatttaatttatgatggttctataataaagtcttggaacatgtagatagttaattcagatgtgggagggcttctgtggtcttgaaaccacccagttttttatgtagtatacctgattattgaactgttagtttcgttatgaagtctagatgttacttggttttggtaaggaaccctatgtagaattttgaggacgtctcctctgccaacctgaattgatcagaatttttatagacctcccaaaggacctctgttttggaaatcttttggggcaaggccagctttgatttgttttctctgttacaacagcattatttgggcttaaatctcagaagtgtgccattctgcttttttactgtttcctccccctggtaacttgagctattataaactgtttaccaaagaagctagtcatttttgtctcagtattctcttaaactgtccctttgaggttgtaaaaaagagagtaataacaattagcaggtcaaccaacaaataggaccttggtatctcacatttcagaggattcttccttaggtctccctactttctttcctgtcttagggatctgggataaacaattagcttggtaaatcagtggtaggaattaaatgtttctgtgcagtttttctgggacataggacaataataatggggaacaaaataataagagaatgagtaacaagacagtagtaataagaatgccagattaaaaataggaagatggaaactcactgactggtagaaatgtaaaggataaattctgatgtaaaacattctgtagctgagaaaaacttgttagtgaacagacactggattaggattcaataaatttggtttagtttgctgccaacaaccttgggcaagttgcttagcccactccacctcaattctcccatcaaaaatgaaacggttaaactgtatcaggtttttgtttggttctttgttgtgttttccccaaaaagtatcctcaagtcctggagatccttggaattacatcaagggcccaagtgagattggggagggcatgaaaaagagagcaagtggtgctacacagagtagttccactttcctctagtttatttttgtgtttcctgtaatgtttccttcgaagacacttccatggccaaaaaatcagtttggaaacatctggactgaaatatgttgaaagtgccttctggtgcctaggatttggtgtttatgaatctccatctgttggctggatgtctttgttcttggtataagtctttcatggttagggaaattttactggctgaatcatgaaggaactgtataatacaatgggggatcgtggtatctgactgctaggctgtgctctgatgttaactgcccatgagatagttctcaactaagcaattagaaattaaaatactttttagctctccgggagcttgggaaatcctgataaaaagatgcaaagaatcatactccttgcttatcaaaacctatttatgctagctgccattttttttttcgagcacttactttgtagcattttatctgtatgtctcacttaaccctggggtggtcttgtgaagtagctggagttagctctgccgtaaatggtagttgaggcttactaagattgtgtagcttggctaaactcccacagccagaagtgcaagagctggggattgaaactaggattgtgtttctaaaatgtgtgcattctttattatgttcacctgcctttcttaaagttacaggagttttgtagctgtgagacgtttttaatagcaccgctgttactcatgtttttcattaatgaaatctggtaataaaagtgattagcaacgttcattgttcttaactgcttgttatgccaaggactcttaatagtagggcagaaatgatttgattatattgtatataccattccttatctgttaggtcctcataaataaggaaaaaatgagaaatttgtaagattagagcagaatgaaataagctatgttttctttaatggttggaaattattcctaaaagaataatagatatgaaaaaaatctaaaataggtgatgctaaattctttagagtcagtgaacatacagagattagattgttttatgatcagtgtggtgctaactttgatgccctaagaatggatttaccatggtggtacctaatgcaaggaaattgggcatttttttcttcacaacataatttattgctggacactgtaaaaatatcaaaacgtggtgggcattagtgccactcactacaatttctagttctcctttttgcatgtggaatatcacatttcccagcctatttcaagatggcatggtcttgtgacttgctgtgtcccatggaaatgtgtcgcttttggctagaagcatttaaaagctgatgtgaggtcgggcgcagtggctcatgcctgtaatcccagccctttgggaagctgaggtgggtggatcacctgaggtcaggagttcgagatcagcctgatcaacatagtgaaaccttgtctttactaaaaatacaaaaattagccgggcgtggtggcgcatgtctgtaatcccagctacttggaaggctgaggcaggagaatcgcttgaacccgggaggtggttcaagcgattctcagtgagcctagaccacaccatcgcatgccatcctgggcaacaagagcaaaactcctctcaaaaaaaaaaaaaaaaaatctgacgtgaaatgctctctctctttccttgcttttgggacctggaagcacaagtagctatgacagtaccacatgatgaaatcaggttggaatactgccctgaggcttgaaggattgctgccccagagagttgcctggagccatagtgatctttgagtgagtgaggagtaaacttcattgtgttaacttctgataccttctggttgttgttaccatagtataatctagcttatcctgactttactacacacatcatcagaaatcattagtgtaaaagatttttaaggagagggactgaccaagattgaagcataattacctcagatgcagataaggtcaatagcatagttaagggcaggttttctcttttagctgtcacctgttttatgttttgtcagtttattcttcttttagctcagttttggtcgtatcactgccccatttaaaaatagtagttcctcattgcccaccgaataaaatctgagtaaggcctgccacagtttggttctgcaacaacacgctttaaaaactgttctctcactgtggtgaagtatttatttatcatcatgtgcctttgcccattcatgcatttgagaaacatatattgattactttgtgtgccaatgtggaggctagaccctagggacacacaaaatgttccttcccatctgttcatgtccaattctgccttagcttttcaagctaagtcttgaaggatgtttcctacataaaccctgcttcattctcacagttggttataagctgtctttctgacctctcaagcatttctggcacactgtttcctatcctggttgtaaagttgtacttgtatatctcattccctttactgggctagtgtcacacctttgtatctttagtacctagctcccagcttatggtaggggctcagtaatctttactgaatgaatggctgttagattgtggctgtgttgaaaagccaatgattaatttgcctttgtttgacaaattgttactatctttaaagttattttgccttcgttgcttgcacttacctccttctagctattatcattgtgtgtgttcattcttagtactcagtagggccttatgtagcagtggttgtgtttttttctttttttataagctatctggaatgctgtatcctagcacattctggtgagctttccttaccattgtttaaagtctgttttgtgttttaaagatccattgtgaagtttcttaatgtgacttctaagtctagagcttatgaatagatgagtcatgtgttttaatcgattcagacttagttttgtcttggtgtcttgttgtttctactgatgttttcctgaaagatttgtgcctttgaatctgtgttctgaacttatactctggtttctcttcgtatggtgttagtctttccccttttactaaagagctttgaactgggtagtttaaaagacccagattctagtttagtttggcttctagctcactttgttaactttggttgtgaagtttgtatccacgaaacaaatgagtttgacaaaaatccatgattcacatactgattttactatggaccgggtaagttatttgaattctaatcttgtgtggatacaaaaattggagacaaaattctggtagggttggcaaaggttgaaggaaactttatttatttattgagtgcttactatgtgctagatgctgtttatttgccttattcactaacctgtgaagattttatctctgtgttttagttacagaaatatgagatacaaagaagctaggatacttattgagctagtaagggcaggatccagaacttcggccaaagtcaatttcattccaaagccagtgttctttttgttgcagtttgcaagccgttccagacttctctaacggagtagcctttaggacaaatgataggtgttgtatgtgtctcttgaagaaagtactctctgttgcatgtcatactactggtagaatacctgccctcaccccccaccctcttttttttgagacagagtcttgccccatcgccaaggctgttagagtacactggtgatcacagctcaccacaaccttgaactcctgggctcaagcagacctgctgcttcagcttcttgagtagctgcatctacaggcatgtgccaccatgcccaactaactttgtaatttttattttgtagagacagggtctcactatgttgcccaggctggtttcaaactcctggcctcaagcgatcctcctgccttggcgtcccaaagtgctgggattataggtgtaagccactgagccagaccaaaatgctcttaagatacaaaaactagagtggataaataaactatttctctggatctttgattaagactgcacaccccacggtagtgcagttatttccattgtgcctgtaagtgtgctttaccatcctgagtgaagagtgaagggaccatgattaaaattcccatgacattgtatggttttatgattgtggtttcaagtcttgctctctctcaactaatttttgtgaccttagactagaaaatagtttttttttttgttttttttttggagctgcagttccactgtgtgtaagatgggaaaaacagtacctattttatataccatattgctcgttgctggacacatatgtgtccagcaagcatttattttttgtctgtggttgtacctataattggggagaattttttttctttaagtgtagatcaattatggtataggacattggaaggtagaagaagaggtactatatacagcagttactgacctttccagtctgaattcctatttagaaataaactacttatgttatttgtgttactgttttaggagacatgaattggctaataagttgtttgcagtgttgtttctttgctaatttttgtaaatgtaattagatttcataacattttgtgttaggagaacatagacactttgagagaaaaatgcataataaaagctaatttgatggtttctaggggtagttctattttgaaattcctttcagcagacaatatgagacagcatattatgggctaggccctgaaagaaccaagggagagtaaagcacagtcctaggccacaaagagtatgtctctggaggataagatctctggattttttgtcctacttacaaaacagaaataatatattttatgctagttacaagtagtataagctcattgaagaaatatttaagcagaaggaatgtgcaccagccactaggaatgcaaagataattggggtatagtgagagatatggaaatttgttgtgtaacaatgttagagtaccaactttgtggtatacaggcttctaaggaacacagatgagggatgagggatgggacgggtgtgctgggtctttttttttttttttgggacggagtcttgctctgtcacccaggctggaatgcagtggtgcgatctgggctcactgcaacctccgcctcctgggttcaagagattctcctgtttcagcttcccgagtggctgagactacaggcatgcgctgccatgcctggctaatttttttaaaattttttttatttttagtagagacagggtttcaccatgttggccaggctgttcttcaactcctgacctcaggtgatctgtctgccttggcctcccaaagtgctgggattataggcatgagccatcgtgcccggcctgtgctgggtcttaaagcatgagtaggaatttgccaggcctgggttgaggagagaaagaatggaatgatggttctgctgtgatacactgtgtgcaaagaaacagacgtcaaagagcttggtgtgtttgaactcagtgagcagtgaggtgtagaattatttcgtgtggatagggtgtggtcaccgaattaggttagaaagtcaaaatggggtgggtggaagcgtcttttagtttgtcctcttgaagcaaaagggaggatagtctggttttgttttggatacctcattctgtgagcagtagaggatagtggcttggcagagggagaagggagcattgcctctcagacaagttagaggaggccattaccatagttttggacagattgtgagggcttgaatgcagtgaggttggaagggagccagcagatctaatggacattttgaaagttgaatggatgaaacttgttgagtagatggtgggaattaggaggtggtagttgtccagaataactgggaatttctagcacaggctgctgggtgaatgagagtgcactgaggggcatgattcattctggcatgggagaggagttggcttcctggaagtggtaatgtttacatttggcttagattacctcattcaaagtggttcttgattttgcccacaatctattttagagtccatttattcatctagaaagtaccaactgcttactgcatgccagtaattgatattttaagaatattaaaaaatgttaattgtggtaaacacacataccataaaatttaccatcttaaccatttaccgtcttaatcatttttaagtgcagaggcagtggcatttagctctttcacattgtcgtgcagtcatcaccactgtccatttccatgactcttttcatgttgcggaacggaaattttgtacccatgaaacaataactttctatttctctctcctccgtgtccctggcaaatacttttctacttcctgtttctatggatttgactattctgggtactatatgtaaatgataccacacagtctgcgttcttgtgactggcttacttcacttagcacaatgtcattagaattcatccatgtggtagcatgtgtcagaatgtatttcctttttaaggcagaataatattccattgtatgtatataccacattttgtttatccattcatccaccaatggacactagagttgtttccacatatgggttattgtgaataatgttgctttgaccatgggtgtacagacatctttcgaagtccctgctttcagttctttggcgtatgtacccagaggtggacttgctggatcatatggtaattctatttttaattttttgaggagctgccatactgttttccatagtggctgtaccattttacatttctaacagcagtgcacaagtgttccagtttctctgtaccctcaccaacacttgttattttctgtttttgtgacagtagtcatcttatagtgtgtgaagtgatatctcattgtggttttgatttgcatttttctagtagttagtgatgtgagcatctttttatgtggttattggctatttgtatatcttttttggagaaatatttgttcaaatcctttgcctgtttttcatttttattttattttaatttaattatttttttgagatggagtttcactcgtcgcctagcctggagtgcataggcacgatctctgctcactggaacctctgcctcccaggttcaagcgattctcctgcctcagcctcctgagtagctgggatgaaagagtgcaccaccacacccagctaattttttgtatttttagtggagacagggtttcatcatgttgtctaggctggtctcgaactcttgacctcaggtgatctgcctgcctcggcctcccaaagtgctgggattacaggtatgagccaccctatcaggtccattaccctttttttaaattggttgtaggaattatttatgtattctaaatattaatctcttattaaataagagttgctagaattttctcccattctgtgggttgccttttcactctgttgattatattctttgatgcagctagtagtagttttttttttttttttttgagacagagtctcgctttgtctgtcgcccaggctggagtgcagcggtgcgatctcggctcactgcaagctccgcctcctgggtacacgccattctcctgcgtcagcctcccgagtagctgggactgcaggcgcccaccaccacaccctgctaattttcttgtatttttagtagagacggggtttcaccgtgttagccaggatggtctctatatcctgacctcatgatccgtccgcctcggcctcccaaagtgctgggattacaggcgtgagacaccgcgcctggcctgatgcagctagtagttttttaatgaaccttaaattataagggaggttgttgcttttatagtaactttactgagctcaaatgaagaaattagtttcctccattttcctttagaggagtatgatataattttataatttgaaaaagggttggtattcactttttctggaattttcctttctaggtatgatttatgacctagtatcttttgagtaatgtctccttcctttctttttcatggccctcaggtgtggttattagaataagcatcatgaccatgacttccccgggctggtcgctcatcaccagctgtccagttagaagcaagtctggtcatacctgcttttgtgtaccatgtcttacagtagtagttgtcttggggctgtctccctactcatgcccttcttgtcgactttcacctgggtcatgagaatggcttcaaaataggtcttctgcttcagatttctcttaattttcctgtacactgtttggactggcctttccaaaacacctttcaggggctttgtgatgctttcaggatcaagttcagacactaagcttggcagtccaactccttctaccttgaccttaacccccctttgcagttattttcttccctggtcattagtatattggcagtgtcagtcaaggcattttatcttccttggactggggtaagatgcttgataggtgggccatttctcttctgcgactctcagatttaccatctgtcacctggacgtgcttgtgctgtgctctctgcttggaatgctgtcacctcttcaccttgcctggtttttcagggcctaactcaaatccctttcctccttgaatccttctctagctggtccagcccatagagatcattttccgttctcagaatgattatggcatttattttctgtgctgtttcattgggcaattgattgtaaatggctctgtattgtgttagctttttgtgtgtttttaagaaaatgttctgtcccctttagttccttgtagtagtaatcatgacttgtactctatacaggttctacacacgtaggtaattgatggatcttcattgatcctataacattggttctccaagtgtagtcagtagaccattgaacattcctgagactctttcagtgagtctgtgaggtcaacacatgaaaacattatttacctttttatagtgtgcagacatttgacctgatagtgcatagtgcaaaagcaacaatgggtgaagctgccgatgccttagaatcaatcacgacagtgaactaaactgagctccagtagtcacggtattcattacagtcatgtactgtgagtgagaaataatgccagttccacttaatgtctgtgatgaagtagtgaacattattacttttattaaatctcaacctttgagcacacatttaaaaatgtgggaagaaaagggaaatatgcgcaaaggagttctgcacgtggaagtattgtggttatcttgaggtaaagctctcgtgtgatggacattaaggtgaactaactgcttttttttttgagatggagtcttgctccgtcccccaggctggagtgtagtggcacgatctcggctcactgcaagctccgcttcccgggttcacgccattctcctgcctcagcctcctgagtagctgggactacaggcgcccaccaccacgcccggctaattttttgtatctttcgtagagacagggtttcaccgtgttacccagggtggtctcgatctcttgacctcgtgatccgcctgcctcggcctcctgaagtgctgggattacaggcgtgagccaccgcgcccggccaactaactgcttttttaaatgaaactccatttttatttgaagggaggactttgataagctgtggttatccagaaattggttatttggcagataccttcttgaaaataaagcaagcctttacttcaaggaagtagtggagtctttgttgccagtgataaaatttgagtttgcaagtgaaaatcagaagtttggaaaatatgtattcgccaccatgagcttgacagcttttcagtatttaaaagctttatgagtaaagtaatgatattaacaaatgtgatttttgatattgtataatgaaatgtatctacatttggaagatctgcataactcaaggaaccagtattttcacaaatgatcaatgtatgatgttacagcaaaaatcatgcttgggtaaacgattcattcaaagtgaaagaccagtcacttttaatgtaacagagtacaaaacggtcattgatacagtttcagatttcacattgtgactaactctttaagaagctaccacttgtcaagttttggtgtaacatggaaaaagaatattaacaactatcccaaaagactattaaaatactactcctttttcaaattgggtatctatttgaggcaaaattttaaaaatgtacttccccaaacagtgtaaccgtttgaatgcagaagcagataggagaatccagctgtcttctattaagccagacattaaagagatttgccaaaatgtaaaacagtgccacgttcttatttttgttttgttttggaaaacatagttatttttcataaaagtatgtttatttgtaatgagttcatggaattttaaaatgaagtaatattttataaatttttcagttttaatttctaatacaataaagtaccaataaatataacccacataacaaaagctctttgggattctcagtttttaagagtaaaaaggagggagctcaggcaaccaagaactttcaaaccactgattatagcttacaatggattgaaataagctgatcctcatgaaatactttagtttcttatttgaaaatctttatagaaacaacacagaggaaaataattagtatctgctttcataatgctgagttatatttattgggcacttaatatgtgcctgacactgcactgaacaccgtacctatattatctcctctaacctttatcttatcctgcaacgtatatattaccttagttttacaaatcagggggctaaggcactggcgggtcaagtaattggcccaagcttatttaagaggtaagtagtagagctaagttttagacttagtttaagttgaaattgaaagcctgcgcttttcatcaggatgttctgctgcctcacagaaaagtttgtaagtcggcactgtgtccgcactgctaattgatccttagggaaaagtgcagaatgctgttgtctgaagattgttgatgcaaggttgagcagtggctgaagatcctgcgcatgttttctttttatcccaggtcacgtagtcttgtactgttttgtggagctggatctttagaaggtggttctttcagaacttcagaacagaccgtaactggaagactgtgggcttagtttcttatggttactagtagttagtatgtgaatctagctcaaggttggagagatttttcaggatggctgtagttcagttgtcgttgcttatgctagttctttcatttcattcaggggtatagaaactttagattgtctgaaaatgttattttcaggagttttcccattgggagacaaggaagtggggatggagttgaagtcaggtgaaggtgaagagaatagcaccattgccctgacccctggcttttgggttattgtgctgcaagcatcaggtgactgaaaaagcaaacatgaaagtagagattcagagaggggaagtgactcaacccaggcaccctgcacaggaacatgtgtcatcacggtttcagctccggacggtgagatcgcagtgtgttctcaggcccttgttaggattcttagcacaatagttgtttctgcttggtgggtttgttgattgagagcgcctcagaagcatttatattcacagtatcccacgtgccctactaactcaactttatattacatagacagctactttaaaattgtcttggtacatgtattttgaaatttatatgaacagctttatttacattatccattatactcctctattaaagaatatatgtatattttaattatacttttttatactcattcaactttcattgttttctccaaccttttttaccacctcagtggaaatggaaatgagagtacctgttatagcctgaaaagcagaggaaaaaaggtgtaactctttttaaggtttttcgtcatgtttaacttatgtgttattcccagatttttctccgatgttcatactgtctcttgaaaccagtcttcctttttttcagcactattgtggcctgtgtataattggtacttgtctttcagatttgtattctgtaaacaggctttgacggggcaaatttaaactgttgtaaagattgcctattcatttctaatacatgttttgtggtagaattgaattgctgattgtgtgaagggtttttgaaaatgagggacaaacaaaatgagaacttatgaatagtagcacagtaaaaaaaaatccaagaggaataagaccaccgtgctttcttttttcacttctgaactagtcaatagctttgtattctggtgataattaacaaggtttctatacatacacaaaaatgaggggtagtgagatttagatgatgatatagagaatgaagatgggaaaaaatcctcttggtattaatacatatggtataggtacagagtgttcctttatgtgtataatttgaaaagggtgagggagctccaaaataagataaggaagttggtagactacatgttttgttaattcttatgttagagtgccttctcctggtgtggatgcatttctaagatgaatagttaatttgttcttgtttctttttcaaagtctctttgagcaaatgacaaattgagatgtcctagctttaaggagagaccattgacatttgcctaatgccttctcttgtcttaggctttgccttgtattaaagaagtatatgactggatgtgactaaaatggtctgggaggagggttagtattctgttttctaaaatggattctgggattgttatatgcaattggtgctttaggatgggagaaaatcacctaagtgtaacttcagaatgtgagaaagtgtgacctgtcaactgttttggttgggttttctatgttggagtggtttgtttcttaaattttgctctcaggtttggggtggtagtgaagttactctgaaaattcataatttttctataattagtaacagcatcccaggagtttcagagggaaatacctttaaaaaaaaatgagatgtgacagcacgctgccacgccgacgcagaccccgctctgcacgccagctcgcccgcacccctcatggccacagttcagcagctggaaggaagatggcgcctggtggacagcagaggctttgatgaatatgtgaaggagctaggagtgggaatagctttgcgaaaaatggacacaatagccaagccagattgtatcatcacttgtgatggcaaaaacctcaccataaaaaccgagagcactttgaaaacaacacagttttcttgtaccctgggagagaagtttgaagaaaccacagctgatggcagaaaaactcagactgtgtgcaactttacagatggtgcattggttcaacatcaggagtgggatgggaaggaaaacacaataagaagaaaattgaaagatgggaaattagtggtggactgtgtcatgaacagtgtcacctgtactcggatctatgaaaaagtagaataaaaattccatcatcactttggacaggagttaactaagagaatgaccaagctcagttcaatgagcaaatctccataccgtttctttttttttttttttcattactgtgttcaattatctttatcccaaacattttacatacagctatttcaaagtgtgttggattaattaggatcatccctttggttaataaataaatgtgtttgtgctaataaaaaaaatgagatgtgtatattgatgattatcttttaaaaaataatgggaggtttatgagagagctggtgcacttaaagcctggtggttcagtacgcataacccctagagctcagttttcatggatcaaggcagatttgtaaatagaagaataatgagtcagtatggtaaatgtcaatgggaagattcgaatgaagtgagatgggagcacagaaggatggagcaactatatttgctttgaggagtcaaggagggaaggacattctaaaattttgagagcattaaagaataggttactcttttataattgtagagtttattgtactatgtatttgcataaatggacacataatatttagttaaatacctctattcattgtgcagtttatgtttagcactgtgccaggttcttggggaaggagttaaaaaataaaagatgtcctgtttcagtactttcttgggagtggggctactatgtgaacagcttgagtaacattttgttcaagactcagttgtgggtagccaggtactgtggtggactggtgcttttgttaagtctggtttttttcctccctgctggtaagccactttagaaatgatcagtttcattaatgtaaagtcatattttatacctctacgcactaattcccgtggacatgactggtagctacgataatttttgggactccagtggtcaatgagtatgtctcaggtacttaatttcttccatggctaactagtttttagtgggcaaaaggaaatttgagagaagctgcataatttgctttaacttgcagggtgtgttaagtattgaatcacatctattatgattatggaattttggtgtgtgtttgaatgtcagagatagtgttaaggtcagaattctgctgaaaactgacccatctgaaaaccagtatgttcactccattccactcttcagcaaggccatagtttccctatcatggttcatttctccttttccctgcccattaaaggtagcaaattttggaggttcttacacatttggggttcttaaaattgttctgtaatgtgtaagctcggctgtccacaaatgattataggattgacatttgttatttggtggagtttgatatattagagtaatataaatgtgttatgcttcaaaatgaaatacgggatttttattcactagtttgtctttgtttcattcctttccaaaagaaaattaatgcttaacttgaacagctgattttttgcattgtttcccttaaaagcttgctagcataggaacaaaaggtaacttttttctttgccttttattgttttctgattgtttgatattaagttttggattgatattagaaatattaatagtttatcctaggcaggagccagctttctttaatatgtgccagatgagcttccagtagtttttagactttgagattttagaaacctcattttcagggatgggtgacttcactgctttttctttgtcttaatttaaaattggtatgtatgaccaaaggaatctttctgatactcactggtcctttttggtggaatcgaaatagcgtatgagcaatgggcgtttaagttagaaaatattcgtttatgtaaaaattaaccagaaattactggaatgtagtattggtcaaggttgtagagtcaagttaatcagtatgattaatgggtattaggaatggaaatgttgcaatgtaatgacaagtcatgaattgttaaaagaacaatctgttgttagcccattgataaactttgtgagatacttatttgagagcaaagtttgaaatctttcttttgccgattaaacatgactgtcattttgccattttctgctgtattccaaccattacgttctaagtgctcatttatcctcaccaggagccagtgaagaaggcgacattattctagttttacagatggagaaatgcagcttatgtattaagcagctgatcaggcagcacaaaaccaaggaagttattagtactggtaattgaacctagatttgtctggctccagtccagtactgtccagtagaagtataatatcagccactaggtaatttaaaatttcctagttgctacattaaaggagaagtttattttaatattttaattcaatatataaaagttcattttgacgtaattataaaattgagatattttacatttttacattctttttgtaccatcttcattatttattattattattattatcattattattattattattattattctgagatagggtctgtccctgttgcccaggctggagtgcagtggcaggatcataggtcactgcagtctcaatctcctgggctcaagggaccctcctgcctcagcctcccgagtagctgggactacaggcgtgcgccaccatgcctgtctaattattttatattttgttttgtatagacagggtctcactttgttgcccaggcaggtctctaactcctgggcttcagacgatcttcccatcttggcctcccaaagtgctgggattacaggggtgagccaccatgcctggccttttgtaccatcttcaaagtcagtgtgtgtattttagatgtatagcacatctcagttcaggctggccacatttcttcaagttgaaatgtggctaacccaaattgagatgtggctggtggctctataatgggattgtgtagccctgatacctgtgcagtggccagtactataagcggtaaagaaaccaagacttcggttttgcatgttgttgaattatttaagcttgtagcatataattatagccactagtttaataaaatcagtcatgacaaaaagtgataaagtagccttgtcataatgcaaatatttggttgtctttcccatatttacaatttttacttctctgaacaggagatgatgtaggttaaaataaaatatttaagtagcatttaaaaggcaaataattgcatttagtctagagataaggaatcaatcgcatagttatcattaataataaagaccacaagtggctaagaccactttaaccacaaaaaggagacagttgaaatattgtacatgggtttaagtatagataattaaattcagcagtctgcttatagtacctgctgtgtgctgggcattgtttagatgttcagatgttaaaataagaaatggattctgtgctcaaggatgccacccttaagggtttaattagagccattatttccagaaccattaattagaaccattatttccagaaaaatttggtggtgatgggaagagtctttgtatatttttgaacattccacagtggacactgtttgctttaagtataatctttgtatcatatcatcataggatttgtaaaattttcaaacttctttgcaagtactttgcaaacttctttgtatgcattaaaagaatgcgtggttctgagagatttaattatggcagcctcagggccactttataaaatgctctccttttgatactctgtgagttgccattatgttgccccatttctattcctggtaaagactcaccgatcatactgatgaacttgatctgcattttggactgagcttagtcatacaagtaacgtggccgctgatacattgtgtatcattctggaaaacaattgtatgtcactgttgacccggatatttttatgtataggattgcttagttgcaagatagatgaaaatatagttgcctaatcatttaagagtgaaagattcttggtattctagtttttgggttgaggagggagaataaaaaattttccaagtttagtgagtttttttgttgggggatggagagggaatgtagagagatggttaaccagtatttatgtctcatttcaaaataatgacagctttttttaaaaagcttgaaagatagtatatgccttttgtcagtaatcaacatatgtatgtaatctattctgttgataaatgtcaatatctaaggataagtagggcacagagaagggaaattgtgtacctcattttctctgtaaggctgtaaagagtgaagagggtgagagaaagaaggcacacctttcatattcatctgtcatttctagaaggcttaagtgtctgaatctgactcttgttttttttttttttttttttttttgagacggagtctcgctctgttgcccaggctggagtgcagtggcgggatctcagctcactgcaagctccgcctcccgggttcacaccattctcctgcctcagcctcccaagtagctgggactacaggcgcccgccactacgcccggctaattttttgtatttttagtagagacggggtttcaccgctttagccgggatggtctcgatctcctgacctcgtgatccgcccgcctcggcctcccaaagtgctgggattacaggcgtgagccaccgcgcccggcctttttttttttaatctgactcttttaacagtattctgatagagcagcgatggcttcaagacgtagactgttgtcacttcttttgtctgctgagctgcaaaacagcttcttgggatatctggcccatgactttggataggattgatggcttccctagcccagtctgttcattcatctttggagttgatttcttatctttcctgcttgaaaagaatggatgcagggtatggtatgattctgattatgtttttattcaatatgaagcaattagttgaccataccatgagacagaaaagacaaatactcattgaaagttgatacttaaaactcttaccctaattgggattaggaggaagagtactttatttcaccagagaataatgccagaaaattttgctaagggtaaaagtgtggggaccattttcgaaggaggtcaagagctagctattttatgtaagggaaattatctgaatgggatggaattataaggaaaggaagctgaaatattgaaagagaatttcccccaatattttcttaaatgtgggctattactttttcattggaaaaaatttaaaaggactacattaaaaatgagaatacttaacaggctgaagtaggaggattgcttaagtccaggagtttgaggccagactgggcaacatggcaagaccgtgtctctctaaaaaaaaaatcggaattctgcattttaaggagtgtggttcattcctagttatagattaggacagttgaattatgtgaaggtctgagaactatttccaatatatagacttttattaaacaaaggtatagatggatgatgacttagaaatgcaggcggtgattttgtttcatgcctagtttctcaagttttagaaaatggtgacagtctcagagaaaacaagcaactattttgtgaaatctccaggtgtcaaaacagtccaaggcacatataattagaataaattaagggagaatgttgctttagagttcttgtggtgcactagtcattcttaaagggtgagcaaggcaaaaactaaaaatagatggaagcttatctgcacatttgaacttgtggaacagctggagtgggtctcttactcccttactcttcctaactgaataattctccctctctggttatttgctgtattgagaaagtcttcactggctctcctggcgtttttgagaaggatattaaaggggcttgaattagagcacaggaagtggaataaatggcaggaaacatttgatcatttctgtcactgtcagaatgaaagcccaatatttgatttgagaggttgcaggacagtagcaaatgttttgatgggtttgtgtgtgcgcgtgtgcgcgcgcgcctgtgcacactctcaactttgtatctttttttttctttgcccttctctctaatattcactcttgtccagattttcataatataattggaagaagcaaaggcccttcctcctctgttaatgagttacaatctttcacaggtccaagaaaggcgacagaagggactttctactttgtagacttattattgtttttcattttctactaaaagtttattttcccatgtgctgtttttcggtgtgtatgcattgttaactgcatttccaccatgttgcataaggaacatttgcaatttggtttataatgtcaccattcgtgctccataagggaggtctatactctatctctcatatatccagtacctaaaactcactgcctggcacttaagtaggtgcttcagtatatgtcagcattccaaaggtctttgttactgtaaatagagcattgatgtgaatagtacagatgatggtgggctctatcatgatctctcttggcagggatttatccagagtcatttgaataattaccatgtaccaactagtatgtctggtcctgggtatgtacgtatttaggacctttagagagcttatatgttggtaggagaggacatactaggaaaccaacaattacagtatgggggtgctgttacgagatttgaggtgtgcattagagagcagagaggaaggctacctgacccagtttagagtgagttgagagaattaggggattgtttcatgaaggagatgatggttacatgatcatgttctgtaagatgaggaagagttagcagggaaaaggggaggaaaggcttggagccctgagaaaactttgtccttatgttggggaagtactctgttcagttttcaagttatgcaccattttgactaatctttaaggaagtaatgtaattggttagtttggacttttctcataatttgaacagaggttttttgttttgttttaataatggagcagtttaagaaagaacttaccttgtttaccctaccctaaccaaaccaaaccaaatgaggtgttgcatccttctctgtgcatacctgcatatgattttaaattaggaaagaaaaaccaatccaactctcttgtgaataggagttgctgttagtgtacagtttcttattttggcagcaaacccatctcagcaatgcagatgttctgcagtaaaataggtgacttattaatatgatattttctggttgtgaaaaacagttgcatggccagtatagaagtgacctatttgaatatagtacaatattaatctgcaggcatgcttcagagatattgtgggtttggtttcagactactggaataaagtgaacattgcgataaagcaagtcacacatgttttttgtttcccggtgcatatgttttgtttatactatgctgtagtctagtaagtgtgtgatagcattgcatctaaaactgtacatcccttaattgaaaaatattgctaaaaaatgctaacaatcatgtgaaccttcaacaagtcgtgatctttttgctggatggtcttgccttgatgtggatggctgctaactgatcaggtggtggttgctgaggattggagcagcttaggcaatttcttaaaataagacaacagtgaagtttgctgcattgattgactctccttgacaaaagatttctttgtaacatgtgatgctgttggatagcattttgcccacagtagaaactcatttcaaaattggagtcactcctctccaaccctgctgctagttgatcaactaactttatgtaatactgtaaatcctttgttgtcatttcaacaatgcacagcatctgcaccaagagtagattccatgtctagaagccactttctttgctcattccttaagaagcaacctgccatctgttcaagttttatcatgagattgcaggaattcagtcatatcttcaggctccacttccaattctaattctcttgctgtttccaccacatgtccagtgacttctcccattgaagtctggaacccctccaagtcatccatcagggctggaatcagcttcttccaaaactcctgttaatgttgatattttgatgttctcccctgaattgtgaatgttcttaatggcatctagaatggtgaatcctttgcagaaggttttcagttggctttgcccagattcatcagaggatggatggcaggtctaggattatgaaattagtttcttaaatcataagacttgaaagtcaaacttacttctgggtcagtgggctgaagaaagcaagtgtgttagcaggcatgaaaacaacattaacctccttgttcatctccatcatagctcttgggtgacccaggtgcattgtgagtgagcaggagtcttttttttctgggcagtaggtcacaacagtgaccttaaaatattaaaccatgctataaacagatgttctgtccaggctttgttctagttacggaaacacagagtagacttagcataattcttatgggctctagaatttttagaatggtaagtgagcattggcttcaacttaaagtcatcagctgcattagcccctaacaagagagtcagcttgtcctttgaggttttgaagccaggctttgactttccctctctagctatggaagtcctagatggtgtcttcttccagtataaggctgttttgtctacattgaaaatctgttgtttagtgtagctactttcatcatttgtctagattgtctggataacttcctgcagcttctgtgtcagcacttgcttgtttgtagtgcacttttatgttatggagatagcttcttgtccttaaacctcatgaaccaatgctctgctagcttgctagcttttcttctgcagcttcttcacctgtctcagccttcatagaactgaagagattatttagggccttactctggattggcctttggtttaagggaacgttgtggctggcttgatcttctatccagaccactcaagctttcatattgttaatttgttaatagtaataaggctattgtgctttcttattatttatgtgctcactggaataacacttgtaatttcccgcaagaactgttcctttgcattcacaacttggctgtttgttgcaagaggcctagctttctgcctgtctcagcttttgacatgccttccttgctaaccttaattatttctagcttttgagttaaagtgagagatgtgtgattcttcctttcacttgaacacttagaagccatcatggggttattcattggtctcatttcaatattactgtgtctcagggaatagggagactcaagaagagggagagagatggggtagcagcaagttggtggagcagttagaacatacacaacatttatttagtttgctgtcttctgtgggcacagttggtggtgccctaaaacaattacaatagtaaaataaaaaacataaaagatcaatgatcacagattaccataacagatataataatgaagatgttcgaaatattgtgagcattaccaaaacgtgacacagaggcatgaagtgagccacatgtgttttggaaaaatggtgctgatagacttgcttgatgtagggttgccacagaccttcaatttgttaaaaatctctatctttgaagtgtaataaagtgaaatgcattaaaatgagatatgcctgtattcaggtttattatttatttttattgagattacctttttgttatgtataaaaagcctggttttaaattacagttttctaggtgtgtttatataagataaagccttttggttcttggaaaacagttttgggaatgtcaaactaattttttcattttaagattcctctaagaacttatactagaggctggtcctggtggctcacacctgtaatcccagcactttgggaggccaaggtgggcagatcacttgaggtcaggagttcaagactagcctggccaacatggtgaaacctcttctctaccaaaaatataaaaaatcagccgatgtggtggcacgtgcctgtaatcccatctactcgggaggctgaggcaggagaatcacttgaacccaggaggtggacattgcagtgagttgagattgtgccactgcactccagcctgggcgacagagtgagactctgtctcaaaaaaaaaaaaaaaaaagaacttacctcagttaggacttaattatcctctttgcattactgtgggagttagggcaagacttttttgaaagtactgttgttaattgtggggtagataaatttccttgagcagatgaggtttttggtttttaaaaatagcccaaaagatactcagaaacaagatcggtttaaaaaaaaaaagagtcattatcagattgcgaagtatttgttttatgtgaagagagaaaataagagacatctataaagtaatgcctttctaatgctatttttgaagattcttgtgaaaaagaagctccaaaaatacttgagcaatggcagtattggtgaaggactaattcatccagacgaactttgtataggataatccttggttcattctataatatccagttttggctcttaatcaggattcatgttatggaaatcttctttaaaatattttatattggtttagtcattaatactaatgggtccctcacttagtctaaatgtaaggtgtcactgtattacgagaccttgaattaataagccaagtgctaattaggaaagttgacaaagaagcagtgttcagccactggggcaagaactcagtcatctcccattgtgcgagtgagcctttactgtttagtgggctctgtgattactgtctaggatcatctaaaacaaaaataggtagaaatctaagagaatgagtttgtgtgtatgcagattcacctgaatattgaggtagcacagtctgtggataagtttttgtttttttgtttttttttgggttataactgacaattgcgcatatttaaagtgtattttcacatgtggtcttataaagaaaaccaaatgatcataaaaatgtaaatgagagaaaatattcttagttctcagtgtcattcaggaaaaacttgttggaagatggtatgtgatagttgttgaggtttatttgtctagcacagtttctactcagttactttgtcatttaagatcctaagtacagagagattctagccactaccctatctctctgtctgcaatgttttttaaaagacagtgcagtgcaatgtattttctgatgatatcctttccttcataaacatctctaaagaattatttccatgtaattcttgtggccatcattggtatgtagttgtgttgactagagattttaagttgtatgtgtctgaagtactgtttccacacaacctccttagtattgttttgttttgtttttttttttttttttggggacggagtctcacactgtcaccggggctggagtgcagtggcgccatctcggctcactgcaaactctacctcctgggttcacgccattctcctgcctcagcctcccgaatagctgggactacaggcgcccaccaccacgcccggctaattttttgtatttttagtagagacggggtttcaccgtgttagctaggacggtctcgatctcatgtccttgtgatccgcccgcctcggcctcccaaagtgctgggattacaagcgtgagccaccgcgcccggccttagtattgttttctggtttataagaattgaaaccttgctcttaatttgtccaggtcttctgcctgtattctgctttcatgggaataaacaacactagttactagaaattttgagatttttttttctccttccttctcctagtacatgatgttttgagaggcctgtgtaatcctaaacgcttgatagagcacttttatgatgggagtatgagtagtatgcaagtctatcgactcctctaggcaagtttgtagttgtgtgtgtgtgcgcacacacacgctttaaaagtaaaacattaaccatgtatgtttggtaaatgctagactgtagttttaaaactggaagaaaccgttgaaagtatcttgtcaaatttgttcattttattgatgaggaatttgagggccaaagaggcaactctgatgaggccaattatagaattaattctaaggacctgcatttgggtctacaaaaccagttatggaaatatagatgaaggaagtcttggtttaagtggagcttttagttgaccataataagcttatgttagtcataagtgacatggctgtcagagttgctaagttgatcttgaattacaataataaaagtatgtcaaaacaaggagaaaggggtagcctgttagagaaggcaacaacagcagaatatttgaagtatcaaatgtggttagtcctggatcaccagttttcagaggaacattgatgaactggagcttactgtccaacttacactcctgagaactatttgaaaccagaatctcccaccaggttctccaggtactcactgtacctgacttcaagtgttcttcctggccacatgaacaagtctggttttttgcctgtttttcttaatgtaattctcttgcttttcctcctgtataaagatcacagtgacacctttactttcctaggcatgatcaggccatggtacctttattgactgattgattgagacagagttttgctcttgttgcccaggctggagtgcaatggtgcgatcttggctcaccgcaacctccgcctcctgggttcaagtgattctcctgcctcagcctcccaagcagctgggattacaggcatgcgccaccacacctggctaattttgtatttttaatagaggtggggtttctccatgttggtcaggctggtctcaaaccctccaccttaggtgatctgcctgcctcggcctcccaaagtgctgggattacaggcatgagccacctcgcctggccttacccttatttaaagctgtgaaggctggaagctgtttcccagacttcttgccaagtttggcctgaagcctcagaatacattttctccttgtttttcaaagtggctgggggtttaaatgatcatttgtgggtttgtacccatgctactaatgtcttgtttctaacaaggacatataaaatttcttggccttacactcacgtttggctttctggtgatcttgcatatcagagatggtagctgtcggtagtgctgtgggttgtctacaggaaaaacaaaaatacccctgagaaagcacacagttaaaaatggtattggaatgaccatccactacttttctaccagataatcattattttcattatcttaccttctgagtttccacctggagaggaagggaactaatctttattgaacacttaagatgtgccagacaatgaacaagtgctttacaatgtagattttgtttttccttaccttatagtggtgttcttaccccacttacagatgaagaaactgtggtacatgcataaagtaatgttatatagctagtgaagctggaattcgaattcaaaatcttgactgaaaagatcttgtttgacttttatgaccacaaaagacaaatgatattactctcttatttagaatggcctaactactaccatttttctacctaattatttacttttacacctcttgggccccctatctgttttccctggcatattttcttgagttcttaattatcttgagttcctaatttggaatcatgtattacttctagcagttttctcagataatctcctttcatttctctcgtgcaagactaatggtccatctgggagctgtttttcagggtagggaagagtcagagagaggcctgactacctctgtgcagcaagggaagcgattccctaaactatttcttaaaattctatcttgattggactaattttctgtattagttgaatatctactatagtactctttgttgacatgatttggtcctaggtgcctaagaaaatagtaacctccctctggccttcaggaaatttaggattcggtttgggagttaaagtgtgcacataattggtgagtatgataagtgccacaaggccatagttcaaccagccaaccaaccagccaaccaaaaaccaaaccattggctgttcagagtggggaagagagcacaaatctgcatagttataacagggaggctattctcagtcctggctctggatgagaatatcctggcgagattttaattcagtaggtgtagggtggcgcaggaatctgtgatgctgatatgcactgggatttatgctatcaaggataatcttttatttctttagttctccaaagcatgtttgtttttatcttttgaatattcccttgcattttcccctgcactttactctgaagtgggaataatggaacttgggtgcctgttggctgattcaccatgtttagttagtagatctgtgaatgtaatctttaatggatttaggcagaatgtccaatgtggaagtaaattcagtctgtcttggaattaattgtagaatgtagtaaagtagccttcatttatttgcatatcttttggactaaacttctgtatttaatagaatgcctcgtcatattctgtaaagtctcattaatatggagcctgtaatttaaatctgtattttggaggcacactgaggtaaagtttacccttaataagggcaccattgtttactataatgggctaattacatgtcttaatcattgtagcaggttgaatacaacctcttcttggcagtgttttactggctcctactttcaagttattttctgccttatagtagtaaaaatttagttagttaacttgtctttcctaagcatttagaaattagttgaagttgtaaacactgttagctgaatagaaataagctgacactttctcttcaattgtagagagagattatgtgacttaatcttcccatcagggggatgtgagtgattggaatgctagtggctggcggtgggtttgtttcttaaaggctatatgttgtacttcactgaaccacctgtacagctaagctgtcttgaagttttagtcattcctactcttgtggttggagtgatactgtgggtcttggtagcgtttctgccttttgttctaacatgtcagacagttactctttggccttcttcattcttatcctaattgtgtataacaactagcatttgaatacctaccatatacggggcgtcatgcttgctggccttatgtacattggcctaatatttataatacctgtgtgagtagtgctgttgttatccacattttgcaggtgaaaaagcaaggctttgagggtttaaatacttgtactaggtcaaagagctaacaaatgaaaagatcccacattcaaatccacacatgcttttagaacctgtgtttttagcttttatctgttgccccaggaccaggccagatcatcatcatcacttttctcttttccttatcaagttggtaagcggctgtaggttgttctggtgataatgagagataaaggtcatagttagtgcataatcagttagcattttaaaaataatcgctgctgcattgtgattccagagaatggaataaccataaatgtattacttctcagacattcacagtgatggtgtacaggatcatgctcactctagggcaagcaacattataacattgtttagaagcctgatttgctataaattgaggaacaaggtgtatcaggaaaatctaaaatatccctttgattatcccagtacagtgattacgaacttaaggctgggagctgaactctttacattcataccttagctcttccagctctgtaactctaggcaaattatttatgctccccacacctcagttttctcatgtgtaaaacaagggtagtggtagtacattctttaaagagattttataaggatgaattaagacaatgtgaagaacttagcagagtgtcttatatataccaagcttcaaatattgctttactatcttgagttaataggaaaatcaaagaggtattaaatggagagtggatataaaagctttgaggtgaaggagtggtcaggtgatgaggtgctggttaccttgccccttagtgtttagctgatttgtgttggtggtcctaaagtcaactcttcccagcttttaggtagtaacttcaagatgtaagtaaaaatcctaaattctgaaatattttaaaacattttaaagtggtttacattttacaatattcttgcttgtaggcaatatgaaactcaattagatggtaaaaaaatgattaccagattctttagcagatcaactctacgatataatctgaaagatagagttgtgtgcttacgtgtttttatttatttggagaggttcaggcgaaagaaatgtcaacagtggtacagttacgtacccaaatgaagagttgctgtagttgtgcagatctgggatttggtgtatgaaaaagatgcctaatttcattgggaggctgtttagatgagaggcactttccaacactgggattctatttttttgggtgttgaatgttacataccagattagttctcatttctttttttttagaagaatacgtattttagtctaagaacaatggaaaatagctttctcttttagctatttcaactcaattctaacctcattcctaacttagcctaactctatagtttattttggctgcaaaatcctgcccactttatcttctataaaaatgtatttttccttcaatgaggggaaaaatgcaagctaacatatttattttggattatctttttaccccattattttcctaatgagctctgttcatgcctctctgcaaatcttaaaaaaaaaaaagtcgattcagtttgaggatagctgaaacattttttatgcagaaagtggtttgtaaaatacgggagaattctactgaattccctcttagagcatcattcagtagtagcttactggtgataaagattactattgatgtctttactattctgggaaagttttaaagtttacaaggagaatgttagaattcagtatataaaccaggaaaaactttactttgttatctgaaaaagacctaagtggatataaggcctcattataccactcaattttcattcacttcgcaaaattgacttttatgaagctaatataatacaaggtgaaaaaaatggtccatgatcctggcagtgttgctatggactaatttccatcactttgagtcatattactataaaagggcagaaaacactgggggaggctcttagcagatttctaactactttgtttactttggttgatagggagtttgctgtcatatttttgaaaggtggtggtggtgggattgtctgctatctcctttctctgccacctcccaggtatataggtgatggttacaatttggaaaatatagaaagaaaaaaaaatatacaccccattaccttgagatacttaacattttagttttcttcttgcttttttctctttcttacatggttttaaaaatagtttttaaaatattaaatcatataccattattttctcctttttcccccctttaacactgtgttcccttctgtacagttttttttttttttttttttttttggagtactgtttttaagggatagcatcattttgttctttggagctatcccatttaaccagttctctgttgttagacagcaacgtcccccctccaaaacaacttttcctctcaattccaacattatttccttatgataaagtaaaattactggattaaagtttgaacgttttcaagtatcttcatatataaatgtgttaaattttatccaaaatgcttgtgaccacttcttatttcattcccatcatctaagtatgggagcacttgtttctccacgtctttgtcggtagtgggcattttcgctttcctacactttttcttcgatttctaggtggaagatgataccacctcacattcagtgatacttagaaatgctgtgaatgcctagtcagtccacaaactccttagcctttgttttttggtttaaacccaattctggggacttcctgatcatcccttcttggtattagctaagcttcctaaacacatggatgtttgtgtaagattagtatggtttcattaaaaccaggttgtcagccagatgtggtggctcacgcttgtaatcccagcactttgggaggctgaagtgggtggatcaccgagaccagcctgaccaacatggtgaaacccctctctactaaaaatataaaaattagttgggcatggtggcgcgtgcctgtaatcccagctactcgggaggctgaggcaggagaatcacttgaacccgggagttggaggttgcggtgagccgagattgtgccattgcactccagcctgggtgacagagcgagactctgtctcaaaaaataaaaaaataaaaaatagggaggagccaagatggccgaataggaacagctccggtctacagctcccagcgtgagcgacgcagaagacgggtgatttctgcatttccatctgaggtaccaggtttatctcactagggagtgccagacggcgcaggccagtgggtgcgcgcaccgtgcgcgagccgaagcagggcgaggcattgcctcacttgggaagtgcaaggggtcagggagttccctttccgagtcaaagaaaggggtgacggacgcacctggaaaatcgggtcactcccacccgaatattgcgcttttcagaccggcttaaaaaacggcgaaccacgagattatatcccacacctggctcggagggtcctacgcccacggaatctcgctgactgctagcacagcagtctgaaatcaaactgcaaggcggcagcgaggctgggggaggggcgcccgccattgcccaggcttgattaggtaaacaaagcagccgggaagctcgaactgggtggagcccaccacagctcaagaaggcctgcctgcctctgtaggctccacctctgggggcagggcacagacaaacaaaaagacagcagtaacctctgcagacttaagtgtccctgtctgacagctttgaagagagcagtggttctcccagcacgcagctggagatctgagaaccggcagactgcctcctcaagtgggtccctgacccctgacccccgagcagcctaactgggaggtaccccccagcaggggcacactgacacctcacacggcagggtattctaacagacctgcagctgagggtcctgtctgttagaaggaaaactaacaaacagaaaggacatccacaccgaaaacccatctgtacatcaccatcatcaaagaccaaaagtagataaaaccacaaagatggggaaaaaacagaacagaaaaactggaaactctaaaatgcagagcgcctctcctcctccaaaggaacgcagttcctcaccagcaacggaacaaagctggatggagaatgactttgacgagctgagagaagaaggcttcagacaatcaaattactctgagctacgggaggacattcaaaccaaaggcaaagaagttgaaaactttgaaaaaaatttagaagaatgtataactagaataaccaatacagagaagtgcttaaaggagctgatggagctgaaaaccaaggctcgagaactacgtgaagaatgcagaagcctcaggagccgatgcgatcaactggaagaaagggtatcagcaatggaagatgaatgaaatgaagcgagaagggaagtttagagaaaaaagaataaaaagaaatgagcaaagcctccaagaaatatgggactatgtgaaaagaccaaatctacgtctgattggtgtacctgaaagtgaaggggagaatggaaccaagttggaaaacactctgcaggatattatccaggagaacttccccaatctagcaaggcaggccaacgttcagattcaggaaatacagagaatgccacaaagatactcctcgagaagagcaactccaagacacataattgtcagattcaccaaagttgaaatgaaggaaaaaatgttaagggcagccagagagaaaggtcgggttaccctcaaagggaagcccatcagactaacagcggatctctcggcagaaaccctacaagccagaagagagtgggggccaatattcaacattcttaaagaaaagaattttcaacccagaatttcatatccagccaaactaagcttcataagtgaaggagaaataaaatacttcacagacaagcaaatgctgagagattttgtcaccaccaggcctgccctaaaagagctcctgaaggaagcgctaaacgtggaaaggaacaactggtaccagccgctgcaaaatcatgccaaaatgtaaagaccatcgagactaggaagaaactgcatcaactaacgagcaaaatcaccagctaacatcataatgacaggatcaaattcacacataacaatattaactttaaatgtaaatggactaaatgcttcaattaaaagacacagactggcaaattggataaagagtcaagacccatcagtgtgctgtattcaggaaacccatctcacatgcagagacacacataggctcaaaataaaaggatggaggaagatctaccaagcaaatggaaaacaaaaaaaggcaggggttgcaatcctagtctctgataaaacagactttaaaccaacaaagatcaaaagagacaaagaaggccattacataatggtaaagggatcaattcaacaagaagagctaactatcctaaatatatatgcacccaatacaggagcacccagattcataaagcaagtcctgagtgacctacaaagagacttagactcccacacattaataatgggagactttaacaccccactgtcaacattagacagatcagcgagacagaaagtcaacaaggatacccaggaattgaactcagctctgcaccaagcggacctaatagacatctacagaactctccaccccaaatcaacagaatatacatttttttcagcaccacaccccacctattccaaaattgaccacatagttggaagtaaagctctcctcagcaaatgtaaaagaacagaaattataacaaactatctctcagaccacagtgcaatcaaactagaactcaggattaagaatctcactcaaagccgctcaactacatggaaactgaacaacctgctcctgaatgactactgggtacataacgaaatgaaggcagaaataaaaatgttctttgaaaccaacgagaacgaagacacaacataccagaatctctgggacgcattcaaagcagtgtgtagagggaaatttatagcactaaatgcccacaagagaaagcaggaaagatccaaaattgacaccctaacatcacaattaaaagaactagagaaaagcaagagcaaacacattcaaaagctagcagaaggcaagaaataactaaaatcagagcagaactgaaggaaatagagacacaaaaaacccttcaaaaaatcaatgaatccaggagctggttttttgaaaggatcaacaaaattgatagaccactagcaagactaataaagaaaaaaagagagaagaatcaaatagacacaataaaaaatgataaaggggatatcaccaccgatcccacagaaatacaaactaccatcagagaatactacaaacacctctacgcaaataaactagaaaatctagaagaaatggataaattcctcaacacatacactctcccaagactaaaccaggaagaagttgaatctctgaatagaccaataacaggagctgaaattatggcaataatcaatagtttaccaaccaaaaagagtccaggaccagatggattcacagctgaattctaccagagacacaaggaggaactggtaccattccttctgaaactattccaatcaatagaaaaagagggaatcctccctaactcattttatgaggccagcatcattctgataccaaagccgggcagagacacaaccaaaaaagagaattttagaccaatatccttgatgaacattgatgcaaaaatcctcaataaaatactggcaaaacgaatccagcagcacatcaaaaagcttatccgccatgatcaagtgggcttcatcccgggatgcaaggctggttcaatatacgcaaatcaataaatgtaatccagcatataaacagagccaaagacaaaaaccacatggttatctcaatagatgcagaaaaagcctttggcaaaattcaacccttcatgctaaaaactctcaataaattaggtattgatgggatgtatttcaaaataataagagctatctatgacagacccacagccaatatcatactgaatgggcaaaaactggaagcattccctttgaaaactggcacaagacagggatgccctctctcaccactcctattcaacatagtgttggaagttctggccagggcaattaggcaggagaaggaaataaagggtattcaattaggaaaagaggaagtcaaattgtccctgtttgcagatgacatgattgtatatctagaaaaccccattgtctcagcccaaaatctccttaagctgataagcaacttcagcaaagtctcaggatacaaaatcaatgtacaaaaatcacaagcattctcatacaccaacaacagacaaacagagagccaaatcatgagtgaactcccattcacaattgcttcaaagagaataaaatacctaggaatccaacttaaaagggatgtgaaggacctcttcaaggagaactacaaaccactgctcaaggaaataaaagaggatacaaacaaatggaagaacattccatgctcatgggtaggaagaatcaatatcgtgaaaatggccatacttcccaaggtaatttacagattcaactccatccccataaagctaccaatgactttcttcacagaattggaaaaaactactttaaagttcatatggaaccaaaaaagagcctgcatcgccaagtcaatcctaagccaaaagaacaaagctggaggcatcacactacctgacttcaaactatactacaaggctacagtaaccaaaacagcatggtactggtaccaaaacagagatatagatcaatggaacagaacagagccctcagaaataacgccgcatatatacaactatctgatctttgacaaacctgagaaaaacaagcaatggggaaaggattccctatttaataaatggtgctgggaaaactggctagccatatgtagaaagctgaaattgaatcccttccttacaccttatacaaaaatcaattcaagatggattaaagatttaaacgttagacctaaaaccataaaaaccctagaagaaaacctaggcattaccattcaggacataggcatgggcaaggacttcatgtccaaaacaccaaaagcaatggcaacaaaagccaaaattgacaaatgggatctaattaaactaaagagcttctgcacagcaaaagaaactaccatcagagtgaacaggcaacctacaaaatgggagaaaattttcgcaacctactcatctgacaaagggctaatatccagaatctacaatgaactcaaacaaatttacaagaaaaaaaataaacagctccatcaaaaagtgggcgaaggacatgaacagacacttctcaaaagaagacatttatgcagccaaaaaacacatgaaaaaatgctcatcatcactggccatcagagaaatgcaaatcaaaaccacaatgagataccatctcacaccagttagaatggcaatcattaaaaagtcaggaaacaacaggtgctggagaggatgtggagaaataggaacacttttacactgttggtgggactgtaaactagttcaaccattgtggatgtcagtgtggcgattcctcaaggatctagaactagaaataccatttgacccagccatcccattactgggtatatacccaaatgactataaatcatgctgctgtaaagacacatgcacacgtatgtttattgcggcattattcacaatagcaaagacttggaaccaacccaaatgtccaacaatgatagactggattaagaaaatgtggcacatatacaccatggaatactatgcagccataaaaaatgatgagttcatgtcctttgtagggacatggatgaaattggaaatcatcattctcagtaaactatcgcaagaacaaaaaaccaaacaccgcatattctcactcataggtgggaattgaacagtgagatcacatggacccaggaaggggaatatcacactctggggactgtggtggggtggggggaggggggagggatagcattaggagatatacctaatgctagatgacgagttagtgggtgcagcgcacgagcatggcacatgtatacatatgtaactaacctgcacaatatgcacatgtaccctaaaacttaaagtataataaaaaataataataataataataataaataaaaaccaggttgtcactgaaaagttaaggaagcatttggaaattactgtaaaggaaaaagaacacctaacaaagctttcagtgttggcagtgttctgtgcccaccctttatgtatttagcaattactttagctgaaccagtttgttcatatagaagaaccagtcagaatgtctctgcccttcccttcctctaagcacacacaatggtcatctcctccctttgccttttcttttgaccatgactagcaggtcctcagctagcttacttgttatagacttgttcacacaactttatagctctgtttctgtcaggcatatttctgttttatagatgaaaactttttcttaatttaaatttcccttttcctggaatttattcatgtgttctgaaatgctgctgttattgtaacttactgactgtattgtaaattcatggattttatctgggaggatcttgactttgatactgaagagctgatgcaaaatcttaaacaggccgatgaaaaagagcttgtcaaatagataaaggagctttcttctttctatattcatcagtaaaaaatgttctgtctaggatttgcatagatgactcttttcaaaatcagttttcacctgaggtcattcaggtacctaaaagggaggggagtatctaaacagtgacaaagttgtcaacagggcgttgcatcaagttctcttacacactttcctttttgctatgaaagctgctttctcagagccatccagttactcttgtcatatatgcagtttgaagaagtttacttctgcctcttttttctcacctctaccaaggtaatgatgaccatttagaagccaaggattaattttgggaatggcttagtgtggtggaaatttttaaaaaaattctgcagtggcttaaatagtgcaagtagatttcactgtagggactgatatagcagttataagagcccacggtttgaaagcaagagaaactctaaaaaaacaaaacaaaacaaactgatgtcattggtgtcattcgaaggtttacacatttctgttcacttgaggtcttttttgtaattatgttttcacatatgtagatacctaggagtggaattgctgggtaacactgttttccaaagtggctatacattttacagttcctccagcaatatatgagggcttcagttttccacacattttgccaatacttggtatttttaatcttttttttaatggccgttctggtgggtgtgtattgataatgaccaataatgttaagcttttttttactgttcatatttgccatttgtttattttctttggtcaagtgtctgttcaaaccttttgcctattaaaaaaatttactgtttttgtattgagttataagagttctttatatatcctggatataggccctttattagtttatataattggtaaatattttttcctagtctctgacgtagagtcttgtcttttaattttcttgatggtgtcttttgaagaggaaaagtttttaattttgatgaaatctagtgtatcatgttttcttttatggatcatacatttgttgtcatatatctaagggatctttgccttagccaagatcacaaagattttctcttatgttttcttgtagatatttcatagtttattttgtaagtttgtatctgtgatccatatttgggtttatttttgtgtatggtgtaagctagggtataagttcattttttgcatgtggatatttgcttgttctggtgccatttattgacaagtctcttaaaagttttttttttctgttaaactgtattactgcagtaaatagtcttacatatgctgtgaacacacgccttcattttctgactgaattgggagaagagggaggaaaggagtttgtcttgggtcttggccttattgtagggagcttttctatcatagttcactttgctttattctgccctttaagaagatattcacagtctttgggaacaacgaatagagttctggtcaatttggctttagttaagaaggtgactctgttatcctctccctagggatgattatgaaatcttattttgcacagttagggctgggtaagcctaggatagtacaagctattggacagaacatttgttaaaaatatttttaggctgggcgcggtggctcatgcctgtaatcccagcgctttgggaggctgaggtgggcggatcacgaggtcaggagttcgagaccagcctggccagcatggtgaaaccccgtctctactaaaaatacaaaaattagctgggcatggtggcaggtgcctgtaatcccagctactcaggaggctgaggcaggagaattgcttgaacccaggaggcggaggttgcagtgagccgagatcgtgccactgcactccagcctgggtgatagagcaagattctgtctcaaaaaaaaaaaaaaatatatatatatataatataaaatatacatatataatatacataatatatattatataatatatataatatatattatattatatataatatatattatattatatataatatatattatatatatatttatttctagcatgagaatgatgaaactcttcttaaaacattttattttctttttccaaatagttgtttctaactataaaactaaaacatgtttattacagaaacgtttggaaattaccacaagtatgaagaaaaaactttcttcccctatcattgccatcctgattttggctcagcaacacttttaattttgtgcaattgaaatagggactctggaccacttagtttcttggaataatttttggatctactgaaggattcaggccttttaaaaaatatttctcttgagaagggaaaaggatgggaactcacatttgatgagcatctattgtgagctaggccttgtatcccagaaagctctgtgaagcattaaaattacattaaaatagcatgaaaaatttgtttcctctcttcatcctccctaactccctgctttttttaggcttgggttaaataatttgcccagtgtcactcagctagtatgtggtaggtttgaaaagttggggaaaacttaagtatcattcagttaaaattgttaacctgtgtcttatttcatggtttaagaaagatagttctccccccaccccccaacacagttttctggcttctgtggtcttccttttattttctatcagatttagaagtcccaagatccccttatgtcctactcaaattaagacttgtttctcttctcctttctgtattgtgctttcaactctgaggccctgttttagctttggtgtttattagctgaataaaaagataaagtgagagagcttagagttttaatagggaacatttcttgaattggattgatttcatcatcaattttactttcttaagtattaactaattactagctgtggattcccaggcaagtccactcactttcttcatctgtaaaatgaactacctactcagcaaggatccttctgtggtgtatcagcattccttattattattatttgtttttgttagtagaaccatgaaataaatttctggcgatatgggcacagagtatttgcagttgtaacacaatggtaagtatctatatctaaacatagaaaaggtacagtataaatacagcattataatcttatgtgaccgactgctgtcttatatgcggttcgtggttgactggaaagtcattttgtggtacatgactgtatttgcatttgtgtcagtgggtaaaaagcactggtttcatgtaaaaaaaaaaaagtgtgtgtgtgtgtgtgtgtgtgtagggtatttgtgattctggagcctgatttttccttcttcatttaggaggtatttatgactgtcaaggctacttgactgccagaacttgccattgatgtgctcacttcatcaaatggcatagcttattctaatctgttgtttattttgttgccatagtaacctttttgaaaacagaaaggtggttgatatgtttgtacaggaattcagggcctttcccctgattgacatctgctggcaggaatttttatcctagtgattcgggctaaggcttggggctataatgagtacaaagggaggtgggatatttggacagtttgaagcagacttctttatattaatccactctattaattgctaaattattttatttagtgatttagggctttccactcgagccagctacttgttatatgaattatatttattcctgacaggtgttatgcttgggttcaacatttagaactcaggctagagtggagcacgttgctgctacctcaggcttattcagacagacaaaatagaaaacaatgaaaggtggccccttccagatttcaccttagtacatttggactagtgaactaggatgagcaataaaaggtagttgaggaggtgtggaaatgaaatcctaaaggcaataaaaagtaaaatgttttcacatctcttattctagtgccagtgaacctttgacttggttgcagaacgaatctacatgggagcaagcagttgtttagagtaaaatctttgcacagatgtcttttcccttttcacatgttagaaaaattgggaagaaaatctgtaagtgaaatgccaaaaaactcaatgtaatctttttagaatgtctaagatggactacagaatcagtcttaatctttttcagaagacatggccacagaggcttttgtgggaaggggattgtaatttagttaaaatttagtgaagtcaacaccaggactctagcagcccttcctggtgaattaattttgttctttgtgtccttaagctttcctttttggacctcttacttcctggaggctttctctcctagcccctttgcctttgggtattctgttaccacaaaaggagttaactcttcatatggtacaatcatcatagctgttttgaaatctgttttttagctgagggaattaaggcggaaagaagttgcaaaggggtcatgcatgttgcttttccatttactgtattctcttaaagtatataatactttaaatgaactgttcccttcttttccctcaccttccatatgcttattcagtcaaaaagcccttatcctctgatctctgataagtactgggaaactatctgatcaaaaaaacctatgatcaaaacagttctttggaatgaatgtccttatctgtgtttaaaagatgctggataactcttgtgaacattcagttagtacagtttgtgggcattgttttgaggcccctacaataccaaagaaaatggtcagcaacttggcaccttaccactgaaaggggcttcatctctgaatttgcatttcgagagctcacagtgggagttacaggctttgatggtatcactggtagcccagagaaaactgactgatatgttctaattcttgagacaggaaagaaaacccatacatcttaggattttttgtaatcattgatgcataaataatttaggcaggaaatttagttatttaggatgttttgtttcctgaaatgttatttaattgtatttttctacccacttgtcatattatggaagtagtttatatgacagcgtgctcttatgagcagtcatttaattacatcttcctttggactttcatagcactgtgacttacctttattatagtacttacttacaaacttggagagaaagatgccaactgtctgtgaaaaaaatcagtctgtatttaattaaggcacaaacagagctaaaaattaaggcacaaacagagagagctaaaaattattcatatttttctccttgtaatggcactgtacttgatgcttctatttatttttaattcttaaggtaattttatttttaatttctatggatacataattgtacatttttatggggtacatgtgatatttaatacaatctacaatgtgtactgatcaaatcagggtaattgggatatccatcacctcaagcatttaacatttgtgttgggaacattctaaatccccccctttgtttaaaaatatacacttttttctatttattttgatttagttgtagaagtgccatggttggtgagcaacttggtattgctagagttgtgatggcagcaggaaataaaggtatagatagtgatttgggactagggagtttggctttaatgtgaagaaagcaagaagtccttggaaagatttgaccagagaattgacacatactatattgaagttgtggggcagttgaaccttgtgataacgtggaagatagttatgcttagaggcaaagacaacagcagggaataggtccaggagtgaggacaacgacttgggcagcaggggtggataaggagacagtgtggaggtaaacgaaataggatttgttgggaggcaatgtaggcagtgaaggagaaggaaatggttttatgagagcttgaggtgagaccgttaatgaggataaaggacaacgaatgagcatgtagaagatggattcagtgcagaacatccaaggggactaggatgtctagcaggcacttggcaattaggttatggagcttagaaaagactttagggctagagactcaaagttgagagtggtttgcctataagcaatagttgaaactgagagaatgggatggaaagatatttgttggatgcgaggacaatctggaattagctggtctggccaagtaaacatgccttttcgtcttccccgctttgcccagcccttctttttctttttcttttttttttttttttttgagacagagtctcgctgtgttgtccaggctttccagcccttcttaaagctctagtccaggctctgatgaagaggattgaatttaaaattcatcacacattgttaaacattatataaataaatggtgtgctcttaaaggcagcataaatatctgggtttcaccaaggaaggaatgggaaaatgggttaaacttaaaaaagtgaatgtgtagtcagaaaatgacagagctactgatttgctttttaaaataataaatttaggccgggtgtggcggctcacacctgtaatcccggcactttgggaggccgaggccaggagatcacaaggtcaagagattgagaccatcctggccaacatgatgaaactccatctctaccaaaaatacaaaaattagctgggcgtggtggtgcgcacctgtaatcccagctacttgggaggctgaggcaggagaatctcttgaaccggggaggtggaggttgtagtgagctgagattgcaccagtgcattccagcctggtgacagagtgagattccatctcaaaataaataaataaataaatctgttattattattattttaaaataagagttcttcagcaaaatggataggatatggacctggatttgatttttaactccttttttaaaaaaaaattttattttaggtttggggatacatgttaaggtttgctacacagataaacacatgtcacgggtgtttgttttacatattattacatcacccaggtattaagttcagtacataatagttatcttttctgctcctctccctcctcccccacccccaaatagaccccagtgtctgttgtttccttctttgtgttagtaagttcttatcatttagcttccacttacaagtgagaacatggcagtatttgattttctgttcttgtgttaatttgctgaggataatagcctccagcttcatccatgttcccagagaagacatgatctcattctttttaatggctatgtaatatttcaagatgtatatgtaccacattttctttatccagtctgtcattgatgggcatttatgttgattccttgtctttgctgttgtgaacagtgctgcagtgagcatttgtgtgcatgtgtctttatggtagaatgatttataatcctctgggtatatactcaataatgggattgctgggttgaatggtagttctgcttttagctctttgaggaatcgctatactgctttccacaatggttgaactaatttaccaactcaccagcagtgtataagggttccttttccctgcaaccttgccagcatctgctgtttttttgactttttaataatagccattctgagttgtgtgagttgatgtcttattgtggttttgatttgcatttctctaatgatcactgatattgagcttttttttcatatgcttgttggctacatgtatgtcttcttttgagaagtgtatgttcatgtcatttgctcactttttaatagggttgtttgtttttcttttgtaatttaagttccttgtagatgctggatattagacctttgtcacatgcatagtttgcaaatattttctcccattctgtagattgtctactctgttgacagtttgttttgctgtgcagaagttcttaagcttaattagatcccatttatcaatttttcctttttttcgtgattgcttttggtgtctttgtcatgaaatctttgcccgttcctaagtccaggatgatatcacctaggttatcttccagggtttttatagatttgggttttacatttaagtctttaatccatcttgagttaatttttatacagaatgtaaggaaggggtccagcttcaaacttgtacatatggttagcctgttatcccagcaccatttattgaatagggagtcttttccctattgcttgtttttgtcacctttgtcaaagatcagatggtcgtagatgtgtgaccttatttctgggctctctattttgttccattggtttgtgtgcctgttttgtaccagtaccatgctgttttggtcactgtagcctttagtatagtttgaaattgagtaacgtgattcttccagctttgttctttttgctaaggattgccttggctattcaggctttttttttttttttctgaaaagaaaaaagaaaacttttttcctcaggttccatataattaaaaaaatttttttttctagttctgtgaagaatgtcgttggtagtttaatagaaataacattggatctgtaaattgctttgggcagtatacccattttaatgatattgattcttcctatccatgagcatggatgtttttccatttgtttgtgtcttgtctgatttctttgagcagtattttataattcttcttgtatagatctttcacctccctggttagctgtattcctaggtattttattttatgttattttatgttgttttattttatttatggcagttgtgaatgggattgcctttctgatttggctctcgatttggttgctgttggtatataggaatgctagtgatttttgtacattgatttttatatcctgcaactttgctgaagttgtttatcagctgaaggagcttttgggccaagactatggggttttgtagatacagaatcatgtcatctgcaaatagagatagtttgacttcctttcttcctacttgggtgccctttacttctttctcttgcctgattgctctggctaggatttccaatactatgttgaatagaagtggtgagagagggcgtctttgtcttgtaccggttttcaagggggaatgcttttgcccattcagtatgatgttggctgtggatttgtcataggtggctcttactattttgaggtatgttccttcaatacctagtttattgagagtttttaacctaaagcgatgttgagttttatcaaaagccttttctgtatctattgagataatcatgtggtttttattagtctgtttatgtgatgaatcacattgattgatttttgtatgttgaaccaacttgcaactggggatgaagcttacttgatcatggtggattagctttttgatgtgctgttggatttgttttgcaagtattttattgaggatttttgcactgatattcatcaaggatattggcctgaagttttctctttttttgtagtatttctgctaggttttggtatcaagatgatgctggcctcatagagtgagttgggagaagtccttcctcctcaattttttgtaatagtttctgtaagaatggtaccagctcttctttgtacatctagtagaattaggctgtgaatccatcaggtcctaggccttttttggttggtatgcttttattactgattcaattttggagctcattattggtctgtttagggaataaatttattccttgctcagtctgggtgggggtgtatgtgtccaggaatttatccatctcttctagtttttctagtttgtgtgggtagaggtgtttgtagtagtttctcatgattgtttttatttctatggagtcagtagtaacattccctgcgtcacttctaattgtgtttatttggatcttctctcttttcttcttaattagtttagcgatcttttgaatgatttttcatgtcttgatttccttcagttcagctctgatttttgttatttctcttcttctgctagctttggggttgatttgttcttctctaattctttcagttgtgagattaggttgttaatttgagatctttctttttcgtgtgggcatttggtgctatgaattttcctcttaacaccaccttagctgtgtcccagagattctgttatgttgtatctttgttctcattattttcaaataacttctggatttctgccttaatttcattatttacctaaaagtcattcaggagcatgttcttattttccatgtaattggatggttttgagtgattttcattgtgttgactcctattttcattgcgctgtggtctgagtgtgtgtttggtatgatttggtttcttttacttttgtgaggattgttttatgtccaattatatggttgattttagagtatgtgccatgtcgtgatgagaagaatgtatattctgttgcttttggttggagacttctgtaaaaggtctgtcagatccatttggttcaacgctaagtttaggtcctgaatatctttgtttattttctggctcagtctgtctaatactgtcagtggagtgttgaagtctcccactattattgtgtggggagtccatgtctctttgtaggtctctaagaacttgctttatgactctgggtgctcctctgttgggtgcatatatatttaagatagttaggtcttcttgttgaattgaaccctttaccattatcccatgcccttccttgtcttttttgatccttgttggtttggagtctgttttgtttgaaattaggattgcaaccttttttgtgtttcccattgcttggtagattgtgtttcccatttgcttggtagatttttctccatccctttattttgagcctaggagtttcactatgagtgagatgggtctcttgaagacagcataccattgggtcttgcttttttatccttgccactttgtgccttttaagtgggggcatttagcctgtttacattcaagattagtaatggtgtgtctggatttgatcctgtcattgtgctgttagctggttattatgttggcttgtttgtgtggttgatttacagtgatactggtgtctgtgtttaagtgtgtttttgtattaactggtagcggtctttcttttgtatatttagtgctcctttcaagatatcttttaagggcaggtctggtggtaatgaagtctctcgacatttgctttcctgaaaaggatcttatttctcttttgcttcggaagtttagtttggctggatatgaaattcttgaagatttttttaaagaatgttgaatataggcccccagtctcttctggcttgtagggtttctgctgagagatccactgttagcctgatggggatccctttgcaggtgacctgctctttttccctaactgcctttaacatttattctttaattttcatcttggaaaatctgacaattatgtgtcttgaggataatcttcatgtgtagaatattgcaggagttctttgtattttctggatttgactgttggcctctctagcaaagttgggaaagtttttgtggatgataccctgaaacatattttctaagttgttggcgttctccccttgcctttgagggatgccagtgatttgtagttttgtcctctttacataatttctcggaggttttgttcattcctttttattcttttgtctttatttccgtctgtcttatttcagaaaacaagtcttcaagttctgaaattctttccttagctttggtttattctgctgttaattcttgtgattgtattgtgaaattcttgtagtgtgatattcagctctgtcagatcccttagggtttttttttttttttaaatactggttatttcatccttcagctcctgtatcactttattatgattcttattttccttgggttgggttttgtcatcatcccgaatctcaatgatctttgttcctatccatattcagaattatatttctgtcattgcagcccatttggcctggttaagaactgttgttggagaactggtacagtcatttgaaggacatatgacactctggccatttgagttactagagttcttgtgttggttatttctcgtcagtgtgtgtgggtattactttaactgcagtgtagattgagtatggtcaatagacttctttactgcatgttttcactgagttgaggttttgtgtagggtgtttatttgaagctgacttcttgtttctggtttcagaggggagggtatgtcaggtatctttggtgttaaagctttggggtatgatccagcaggtggctcttaggcttattggacagctggtggactaaacagttgttcagttgtgtggctcccctatgtttcctcacagttgtagccatgttccctctcagtgtcctgaaagtatgggtttctctgccccttgagtgctggctgtagttcatgacatccagtacagctctggggagatctcagtatttatgttcctcccccagcttacaggctgcagagggagagatcttattagtggttttggccaagggttgtttgcttgattcctgggggctccacctcagagagatgcaggtgagcagttgcttagtgcagtcagcccaggatggagggtcagtgctgcgggcccaagccaggggttggttccctgtctggtgatgagccgtcagaggtgtgtgggacctgtgggagatggactggcctcctctccttgagtttactgcagcttgttggagtgtggataaagcacttaatgtctttgctccttcatcagaccgagggtggcaagggcagttccacagtagagtcagtggccgagaggcttttagttgccactagaggctctgtccagggagttgctgagttggtgctagctgagtagctctggttgggggtggctggagccccaggcttggaggacctgccctgtgaggagatatgggatcagccacccacgtaacagtggggccacttttccctagggctgctgtggtatacttgaggcctgcagcagtccctggtcacctcagattttccagaatctggaggtgttaccagtgaagactgtgaaacagcaaagatggctgcctgtccttccctctgggaactttgtcccagggaggaatgacctgttgctggtccaaaggcacctataggaagtggctggagactccagttgggaggtcccccagtgaggaggagcaggatcaggactgcttaaaaaagcagtctggccacattttggtagagcatgtgtgctgtgctgggggtccacttcagccctcggttgcctcagacactctgaagctctaaggctggaacagctgagtcacccaaacagcaaagatggtagccaccccttcctccggaagctttgttccaggggaacttcagatctctgttggctggagagcttgggtgggggtggctggaggcccaggttgggaggtcctacccagtgaagaggaatgggattgggcacctgcttaaagcaacagcctggccacgtttgggtagagcagctgtgctgtgctgtgctggggcatcccttctgttctgggtcagcacagattctccaaagcacaaaggctggaatggcaaagatggtggcccacctcttcccctaggagctccttcttagggaggtgcagtgccactactggcagctggctagaattccaagccagtgggtcttatcttgtgggctgccatggaagtgggtcctgtgggctcttgctggtcagtcccctggattcagcctctttcctaggggtatttacaggagtctaacctcccaccctgctggaggtacagctacttttgccagaaagcccaagtatctaaggctccagggtcttcacgcatgccaagactccacatggctctgttggtcagactgaagactgcaggccctggtggagtgggttcacaaggcgatctcttaacctgaagtttgcaaaggtctgtgggagaagcatagtttctggggatcgctcattcactcactgcttccctgagtcggggaggaacccctggctccgtgttgctcccaggtgcgctgttttcctgccttgcttttctctgttctctgtgggtcaagttgtttccttgattaatcccaatgagagtacctggatgtttcagttgaaggtgttgtatttactcaccctttctgttcctctctgtgagagtcacacacactagctgcctctagtcggctctgttggccactccctagccgtttaaactgtttaaaaaaaaatcttatcgtgatgtaattcacatgctatataacttacccatttaaagtgtacagttattttagtatatccagagagttgttcaactgtcactgtgatcaattttgaatcttttcatcaccccagaacgagactttgcacaccttagttgttatcttgacccaaatttcgtaactgttttgagttactcactgaagatcatttggtctcttaacaggcagcaagaaattgatccagattatctcctttctcgatctgtcgtcttactgacagatttttaggcaccaaaaatcacaattcctttctgtgtatgctactttaagatagatttcttgtcttctgtgagttcatttgggagtttcagtgaaggacctgggtgttttgatggaagtacatggtttatgtgtatccatattaaatttcatcttggtgtattgggcctctcatgtctgtccttggtacatccttttagccttttaggacttctggatcttcagtctgccttttaatgtattaatgttcttagtgaacctaatatggtctgtatatttgatcatttgatcattagattttttttttaagtcattggcaaatgtgttaattagaattaggcagagtgggagtggggaagagttggcgttgcctgtacaaaatctcgtttcttgtagatatttatgaattactcattttgctttgtttacagaaccattatagggttgaggatggcaacagtgggacacgaggcatattctccccctcccacagtgcttctctaaattcctagatttcacctagaagcacagacaaaagcatgagcggcgggaggggaattttagtcacactctttatacttatagccaccatgacgtctcaactcacatttcttcagtttgttcacagcaataacataggggatttgggcataggttttactcaaattcagacacagtgtttttagttttccttagtctctgttaccaatcccttggatgataaaatttattttaaaaaaagaactgtggtgtgtcttcttgaaggtatatgctgagcttttagattattgcttccctttcaaaggcgcacagtccatccctttaacaatttgtgtctgacaccgagataaaactcaatagattacagattgttgaatctagcttcttactgcaaactactgtaatccctttgtaatcttccatctgttttattcttaaataatcttcttctgggacttaggatgtatctctttctagcctgggactaactcctttaagtcagatagtgtgacttatttattctatgttatgtaccctgaagttcattctcattgattgaaaaggaggacataaaatagaaaaagcactcttttatatactttcacacatcaccactctgagccttaagtcttagatcttccttatttgtcttgctgcaaacataattagaaaatcagaaaagctcttttttgtagtccatggcatttttccaaggtacagttcagttttggagtaaagaatcataccctttctggctttccactctaaacttctgcaaattcattcttcttcttgtaagcaaaatcagaggtgtttaattgtttagtcacttggatatatacactgaacatttttagttaaacagacctttctgctttgaattgaggatgactgttaataaggtgttagaaatgaaaatcaatcctgacttcttcttcttaatcagaatccaaataataaggactgcactgctgcagtctctatggggacacccactgctctcacttttctgttttcttctttttaaaaaattttattttttaatttaattttatttttttactgttccttgcagagcagggctaccccaaaggcagtgttcccagagtagcccactttctgtttttttttttttttttgagacagagtcttgctctgtcgcccgggctggagtgcagtggcgcaatcttggctcactgcaaactgtggcctcccgggttcacaccattcttctgcctcagcctcccgagtagctgggactacaggcgcccgccaccacgcttggctaattttttatatttttagtagagatggggtttcaccgtgttagccaggatggtcttgatccactttctatttccttatagctcatgttgacagcttttctctccaacatgggtctactcatctcatgtaaaattattactatacgttcttgttgagatcatgaaccttctctaaaaatttcatgaggttgtggatttggagaagtattcctcagtccattcaatacaataacagtaatgactatagtttattatctactgtgagtcaggcaccaactgtagcgagacattctagttacgttttcttgtatacttccccacagtgttacaaagaggacatgatccccttttttctgatcagtaacttgaacctgtaaagtgaaggttgaatgaattgccccagacctcatagaaataatatattctgcatttgtatttttaaatcagtttttaaaaagtaacacatctaaaatagtaagaggcatgtctaaaattctagtgtaggtctgtttaacaccacagtgagtgctgcttttttttggtgattgagggcctaccgtaatatatcattgtggcagcttctttggaagataagaaattatccaccagaaataaagaggacacattctcttttaaggaaaacaccatctcggcttttaaacacttttcttttttaaagggtgaaggaagccatggagatttcttaagaagagagacacttcctacctttcttttgggaagcactgtactgattctgttcagcagtgtacagaattggagccatagtagaaggaggtggagattggagagcgcctagctcagcacccttggcgactagttgtagccctgactccttggagtgatctgtatgtcactctgtatttggacacagctgtttcctcgggttgcatggtaacaaaccaaataatttgcctttaggctcttttgcttactatgtctgtcatcttttacacaactgaagcctttggtggagaaggattttgagttgactacattgcttaattgtaatgactattctgtttgacctttctaagccagagcttcacgaagagagatttgaatgtttgctccgtagaagtaggtctcttccaggggtgaggcactgtcttaaaaagttataaagaggccgggtgtggtggcttatgcctgtaatcccagccctttgggaggccaagtcaggtggatcatgaggtcacgaaatcgagaccagcctgaccaacatggtgaaaccccgtctctactaaaaatacaaaaattagctgggtgtggtggcgcccgcctgtaatcccacctactctagaggctgaggcaggagaattgcttgaacccgggaagcagaggttgcagtgagccgagattgcgccactgcactcctgcctgatgacagagcgagactccatctcaaaaaaaaaaaaaaaagttgaaaatactaacttttaattatcccttaaaaatagatattccagtttttctgatttttagtaatacatgtttgttacggaaattctgaaatatgtagaccttaacttatggaaactttagaatataaagtagaaaaatgaaaattacccataattgtaatttctaggaataatcactatgaacatttgagtcttcccctttctttttttctctttttttgtattttttgttttttgtttttttttttttttactatatatgtatggagtgcaacacatctgtattttagttatcactttacattgattaagcatttgtacatgctattaagttcctctcatagctctaatttatatattaaaataatcattctcctaatgttatatagattatttccagattttaatagtataaataaaatccttgtagacacagttatttgtaaatgtttgatttttaatacctaatacgtattagacagatttctactgcgttgaaacttagggtgatcattttgaatggcagtttttacaactgaagattttccctcctgaaaactttattttaagcatcttggataaatgtttcttaaaaaacattatatactttaataaattacttaacagcttaagttttccgtgacaacttggtgccatcattaaattataagcatcaatcttactgtgttgctggaatagtctcctccttaatggcttctatcactccagcctttcttgttcctgtctggcttctttctaaatatttgttttccttagtgtgttgcattgagtcatacttttctgcatgtacttgtctagacagtttcaactaccttcatgtcataaactatatcacttttgtgcgaatgattcccaaatctacagctctaaccaagactttgcatgaactttagatccctatatccatctttctggtgctcattgtcacaaactgttatcctttgactgtatcaaagacacctcaaaagtaacactagaatttaacttgtattcccctgaaattactacttgctcatctactttttctttccttcgtctcactctgtcacccaggctggagtgcagtggtgtgatcttggctcactgcaacctctgccttccgggttcaaaagattatcctgcctcagcctccggcatagctggaattacaggtgcccgccaccacgcccggctaattttttttttttttttttgtatttttagtagagatggggtttcatcatgttggccaggctggttttgaatgcctcacctcaagtgatctgcccgccttggcctcccaaagtgataggattacaagcctgagccaccacacccagcctgctttttcttttttttttgagatggagtctcgctctgtcgcccaggctggagtgcagtggtgcaatctcagctcactgcaagctccgcctcccaggttcacaccattctgctgcctcagcctcctgagtagctgggattgcaggtgaccgccacaacgcccagctaattttttgtatttttagtagagatggggtttcaccgtgttagccaggatagtctcaatctcctgaccttgtgatccgcctgcctcagcctcccaaagtgctgggattacaggcgtgagccactgtgcctggcctagcctgcttttccttaacagtaccatcatctatctagttaaggtgaaaatctttctagactcctacttagtcttcactctcaagtatattggatcactaagttctagccatgctacctttcaaatatttctcaaatttgttttctcctcttcatccctattactattgcccatatttaggttcactagtttttatcaggacagctgcagtagcctcccaagttccttttcacagacttaccttttcaaatgtgttttcatatcaagggcaaaaattgctttcttgggcatacatgtcatgctattttaatgcttacagacttttaatggcttcccattgcacctggagtcaaatttaactccatattagtctataattgtttctttttatctttctggcgttttctcctgctcctatcacacacacactcaccaagcttttgctatcaaacttctagcagttttctgactattgtgtgcaattttatgtgcatatgcatttgtacaggctgtttattctccctggaaagtacacagcccccgatacagctcgccctgcattttacccatcattgtaatgcgttcttagaagatacagtggaagttcactggtgtgacattattcatgaaccctgtcacccccagcctggacagaaataccttccttgctccatgtttattgagccatttatgatactttctgtggtagacaggataatggcccccacaaagttgtccatgtccttatccttggaacctatgaacattttaccttatatggcacaaggttctctctgaagatataattaagatgaaaggccttgagatgtggagatcatcttggattacccagatgggccagtctaatcataggaatctttaaaagcagagaacctttcttgcctgtgggcagagagagagatgacaattgaagaaaggtcagataaatttgactttgctggctctgaagatggagaaaggggctgcatgcagccaagagatgcaagtgcccactagaagctgcaataaaggtcagggagaaagattttcccatagagcctcctgaaaggaatgtagctcagatggcaccttgatttttagccctgtgagatcgatctcagatttctaacctacagaatgggggaacagagtttttttttttgttattttaagttactaagtttgtggtagtttatgacatcaatagaaaatgaatatactgtcattgcatcttctctgtcttatcaagttatatagctaatttcttatttttcactagatattaagctctttaaggacaaggactgtataattttattttattttattttatttgagacagagcctctctctgtcgcccaggctggagtgcagtggcatgatcttggctcactgcaacctctgcctgcagggttcaagcaattctcctgcctcagcctcccaagtagctgggattacaagtgcctgctaccatgactggctaatttttgtatttttagtagagacggggttttgccatgttggccaggctggtctcaaactcctgacttcaggtgatctgcccgcctcggcctcccagagtgctgggattacaggtgtgagccactgcgcccggcccgttataatttcatctctatcctcagaactttgcacagtgctaacacagtgttaaccctgaaaagtttgaatgtgtgaattaactaatatagtgttatttgtatcctgataatgtgttcagcaatccttgctacataccaaatccccctatttattttttgggttactgttttcactttttaaatggtgtgtttttttttgttgttgttgttgggggaggggtgcagggaagtctctttccttcttgttaactttttttctttctgctcctattttctttagccatggtggttcttttcctgttgatagtttgttgcttcaaatatgtcatttgcacatgacagtttaaagtagagtgacattgtatctaagtcccttttggatagaagtttttgtagtaaagctaagatgttgggagtttatgttttctcagtgtgtctttacaggcatgtacttcctttcccatagagaaatctgaacaagaattttaactttggtaattttattaaatgaaataaaattactgatttcgtctatttgttaaacttgcattccagtgtaaatcttatatgaataccagattcacttatcctgccttaatttgccaactataaacctggataaagtacaaaaaaacaactacatgaagacactagagagtaaccaacaacagtggtttctggagggcagttggtatgtggaagaccagcagtcactggatgagtttcttgtttttcatggcttctcacctgatagcaggcctcatgtgacagctggaagtccataggaagccttcagtggttatgacttgtcccatcaatcacagtcattggaacatgaagaaagagagtgccctgccaggggacatccctaattctgcatagaaattctatgcaaatcactgaaccatgccccataccatcagaatggggcatccacactaatgcttaaaactaaatagagattggtgctgccatcaagagacagaagtttgccatctgagtttagctacctggtaaaacaaaacaaaaagtcaggattctttggaggaatagaaaaatccagagttgccacaatgcccaggatacatctaaagttactcaaaatttgaagaaaccggaaagtgtgacccattctcaagagaccaactaattaatggagattggatcccaagatgacctacatgttaaacttagctgataaggattttaaagcagctgttattactatactcatttacacacaggaaaatctacttagaatcaaagctatgaaatctggcagagaaatagaaactgtaaaaaaatttatttgaaataaaaattttggccgggcgtggtggctcacgcctgtaatcccagcactttgggaggccgaggcgggcggatcacgaggtcaggagatcgagaccatcccggctaaaatgatgaaaccccgtctctactaaaaatacaaaaaattagccgggcgtagtggcgggcacctgtagtcccagctacttgggaggctgaggcaggagaatggcgtgaacccgggaggcggagcttgcagtgagccgagatcccgccactgcactccagcctgggcgacagagcgagactccgtctcaaaaaaaaaaaaaaaaaaaagaaataaaaattttacaggataagtttaatagcaaaacagagatgacagaaaaaaatcatcgcactgtagttcagtaagaattactgaatttgaagaacagagagaaaaggagattgaaacaaaatgaacagaacctggaaaatgtgggacagtctttaaaaggtctataatatgcatgtaattggagttctaaaaagaagggagcatgggaaagaaaaaaatatttgaacaaacaagggatgaacattttataaatttaatgtaggaattatgtagagatcgttgccgtttgacaaattaaaaggatgcttctttcacattgagcctaagaataatttaggcttgactttcttctccccaatgatctgatttatcaagcctgactgatttcagttgctgtagtgtttctttctgggtcttacagatccacactgttatgagatcactagattaaattgcagccaggactaaattgcacaaaatggtagaatatatggatggtggttttttgaaacatgccagggctggtttctttcggagatctgtagtgaacactggatctttttgtgtgtgctgcttttccctctgccctttttctttgctttcctttcctgctaccctcttcttgtttctgagaaagggcaaaaaggagactgaagcatttgagctagactggctacatcaaaggcagtgagttctattgatatctgagtcagctgcaacataaagcgactactggggaggcttttgttgggtctttactttttttttttttccccctgggtgatgttgctggtggcagtgctaggagtcagttggtaatgagtccttgccaatgtgccttgattgaaatttggaagccagattcctgtgattttaaccataacctttttagaaatgcatacttgtatgctcaacagccaggtagtatgtactgcggaagccataatgattgttacagttttgaattactgctcccgaggccctgttcctacttctttttgtcctagttgctcttgaaccaccccgatgatcactcttccctttcccacacggcgtctatgatccaacaaccaaagggttaaagtctggcatgccttcctcttttctgttttatctgactggcgactttcctcttcataaatactgaaatatctcccttccctgtccctgttgtgcctgtgcccatccttgtgtgtgctctagtatgtgttaaaaatagttgttagaagtccagttacagattttggaaggtaatacagtctagaatttaaaaaaatgagctttggatttaggttgactccagagtttataacttttgagcagtgtccttaaacaagttctttgagccctattgtccattttcttgtagaatatggataatatctattcctgagttttgaaacttaatctgtatgataagccttccacattcatatttattcctttgatttcattttggttttatcatagccagttatcctaggtcatttctaactctctagtttttgtataattattctgttttaaggaattaatttcaaagagggaggttagaactggtaggttcttgttcatctgtctttaccaaagagaagtctgaggctcagagttaaattgagctgctcaagcttatataactcggaagcagtgtaactagaatttaacctcaggcagtctgataccagagtcaggactattaacaaatttgtatcaacatctctctaacaataaggttatgtcggtttagaattttcaattgcttaccccgtccctttttcttcttttactagttctttaatttctaaggataggttaatgatgaaaccagagactaaactgtagttttctcctaaacctgcttgtaattacctttattgatctttaggcattaattactttttttatttttttgagatggagccttgctctgtcgcccaggctggagtgcagtggcacgatctcggctcactgcaagctccgcctcctgggttcatgccatactcctgcctcagcctcctgagtagctgggactacaggcgcccaccaccacgcctggctaatttttttttttttttgtatttttttttagtagagacggggtttcatgtgttagccaggatggtctcgatctcctgaccttgtgatccgcctgcctcagcctcccaaagtgctgggattacaggcgtgagccaccacgcccggccaggcattaattactttttaaccttgctgtatatatctgttctttagtaggctagagatcttttaaaggcaaatatttggatcttagtcatttttaaaaaaaattttattattattatactttaagttttagggtacatgtgcacaatgtgcaggttagttacatatgtatacatgtgccatgctggtgtgccgcacccattaactcgtcatttagcattaggtatatctcctaatgctatccctcccccctccccccaccccacaacagtcaccagagtgtgatgttccccttcctgtgtccatgtgttctcattgttcagttcccacctatgagtgagaacatgcggtgtttggtttttttgtccttgtgatagtttactgagaatgatgatttccaatttcatccatgtccctacaaaggacatgaacttatcattttttatggccgcatagtattctatggtgtatatgtgccacattttcttaatccagtctatcattgttggacatttcggttggttccaagtctttgctattgtgaatagtgccgcaataaacatacgtgtgcatgtgtctttatagcagcatgatttatagtcctttgggtatatacccagtaatgggatggctgggtcaaatggtatttctagttctagatccctgaggaatcgccacactgacttccacaatggttgaactagtttacagtcccaccaacagtgtaaaagtgttcctatttctccacatcctctccagcacctgttgtttcctgactttttaatggttgcctttctaactggtgtgagatggtatctcattgtggttctgatttgcatttctctgatggccagtgatggtgagcattttttcatgtgttttttggctgcaaaaatgtcttcttttgagaagtgtctgttcatgtcctttgcccactttttgatggggttgtttgtttttttcttgtaaatttgtttgagttcattgtagattctggatattagccctttgtcagatgactaggttgtgaaaattttctcccattttgtaggttgcctgttcactctgatggtagtttcttttgctgtacagaagctctttagtttaattagatcccatttgtcaattttggcttttgttgccattgcttttggtgttttggacatgaagtccttgcccatgcctatgtcctgaatggtaatgcctaggttttcttctagggtttttatggttttaggtctaacatgtaagtctttaatccatcttgaattaattttcgtataaggtgtaaggaagggatccagtttcagctttctacatatggctagccagttttcccagcaccatttattaaatagggaaggatcttagtcatttttgaatcctttggcagattcagttttgtatccctcttcccatttgtactgtctagcactgcatcttattcatcataatgggcacacagtactttttattggtgacagtgatgacttgaataaaacctttgaaacaccagaataagcttttaaatttttgctcagttgttaagctttggaatcttggaattaagagaaacttaaagatcctttgatctttttcctggttaatcttctttaatttttgtccactgctatttttacaacatgatttttattttgtttaccatcccttcactttgttcccaaccttttaaaaattttatctgtgtctgtcttggtgggttcccagcatggaccattatatcctaggtttgttaagtaaatagtaatttggaatcactcattaccttctctgcattggatactacatctattattgtattaactacacacacacacacacacacacacacgtatgtaactcaatcatccgtgtattagtgcacaccaacaatcttggcacccattttatactgttgattattcatttgtgaacactatagtatattttacaagtgcttctgtgcttttctacctttatttgatgtagttgattctaaatatagaccttgcatatatgtatattcagtacttggtacatggtaggtactcaataaatgtttgagtgattgtgattttgaacttgcctactttgcgagccctccttcccacctttccgcttcacagcatcctcatattaccttgtgatctgttcctactgggccaccattaattgttcctttaaagagccatgagttatttgtgtctctgtgaacatacacacagttttatccatctagaatgacttctctgtcatccctaatgtattgtcaggcttttttcattctttcaacttctgagattgagatcagattacctctctgcagccttcctgaccatcctttctttcctaggtagaattggccactcccttgtgtcttccttgttttcatatctgtttctcttggaacatatctactttgaaggaaaagactgtatttttactgttctatctgcagtaccgaacacaatatgcctagtaataactgcttactgaattttggcgaatgagtgaataactaaaataataatgggacatttcaggggttgatatttcggcctgcaatcttttcggctctgttatccaacctgttgcccattagatccagcaagtttggtcagggtgtgctctctgtcctcatccagcttactgactcaagtgttgacggaggcagagttgaggaggacatttttgatgcctgatttctgatatgttcaagtactcaaatttgcacattttaatttctttgtatttttgtctcaataatgtgaaagaacaacaaaacttcaaaatgttgtgtgagtaggtggttcttaaactctttcttgggtgaatgaatattataagactatgttggaaaagcattcttatatttctcagggtaaaggaacttttgaggtattctatgaagacttattaaggctgcaagaagctgaaattgggaagcctgtctgtttttctagtctggccctcaatttgcattacatctttgaaatagcctgagtatactgtcttatggttgatgccccttttagacggtcagagtcttagcccttctagaggtatattgagattggaaaatcacactgtgttatgacttttcgtggttttagtagttgtcctctaagtttggactatttaaaatctctagtagcagatgagaggtaataactctttggaaacagactgagataaaattaagttttggtaaaatcagtcgtgatttgtagcttggaagaataggcatattagcattttaacaatatagctttgatgctttaaagaacaccaggctactaaagagatgtcttggttctctcagatgagttctgttgtatcactttcagatattttgttctttatccaagcaaagcacaacaagtagtttctaatatgaactggatttgtagaattttgtatgaagtctgacttaaaatataattaaattaacatttggggaatgagtttagtctttactaatttttttaggtcagagagcataacttctgtgaagctgcccccatttcacccttcatgcttcacaaatacttgtagaatattttcattgccttgcaattaggagtttacatacaggtctctcctaacagattgagagctccttgagggctgtgactaccagttgatctggcccttattaggtgtgtaaatttttttttttttttaatcagacttttgctcttgtcacccaggctggagtgcaatggcgtgatctcagctcactgcagcctctgcctcctgggttcaagcaattctcctgcctcggcctccccagtagcttggactacaggcgtgcaccaccacgcccagctaatttttgtattattagtagagatggaatttcaccatgtcagccaggctggtcttgaactcctgacctcaggtgatccacccgccttggcctcccaaagtgctgggattacaggcgtgagccaccgcaccaggccaggtgtgtaaatgtttaagaggataaatgagagatgtcatgtgcggatatatgtcctattgcaaccagaaagtgcctctattaataaggaactgcatataatagtgccttctagaatagatagacctgaggttagggctgtagttgctatgtacagtggatattactattgggtgttcctgtcagcaggattacctctttccaggtagttccagattgtgacaaatggattaatctggtaaagacaggtgctgttttaggtataaagtttagcattgatccctaagtttacttctggaatagctgctcatctggagtcatcatttgcaggccatttctggtggacccaccagctgcaagatacagatttattatttgacctgttttcctccagtgcaaggatactgtgactgttaagcagcatgcattaaataactaactcatctgttaataagtgtgcacatagactttggccagaacacattagacccctgaacagagaatcttaaaatactaatgcatttattttaggtggcaaagaactagattagtcaactaaaagcacatgaaaactgtcaactccagttttacaatctacatgccatgtcgatacagaacttgtgataatgtgaatggcatttttagcagagaattgtagtatttaaagacaaaagttcatgagtgttctgaaataatggtactttttctcaacctctcgctacatgggaaaggcagccttcaataatctctcttccaagtaacatatagggcagtactaaagaaaactgaatcagctggttgtgatggctcacgccggtaatcccagcactttgggaggccaaagtgggtggatcacctgaggtcaggagttcgagaccagcctggccaacacggtgaaaccctgtctctacaaaaaatacaaaaaattagccgggcattgtggtgggcacctgtaatcccagctactcgggaggctgaggcacaagaatcacttgaacccagaaggcggaggttgtagtgagccgagacctcgccattgcactccagcctgggtgacaagagcgaaactctgtctcaaaaaaccaaaccaaaccaaaccaaaacaaaacagaatctgcattcccaagagtccatagtagaggaggaagaactgccagtgcctttttaaaacgccagtttataagagttgtgcctgattctgtttcgatgctaataaaggtaattcactttcaactcagacatactgctttataaaacaaacatgtttaaaacagtagcattaaaacattatagtttgttttatagaggaataatctgacacctagagagattacgtggtttgtacaaggttctttcaaattcttaactagtttagaggctcacgatcggtctttttaaagtagcttttccctttccaaaatagcttttcttatccctccttgcctttcattttgtaactttataataaagtcagtatgccctaatcactttcttttgtttgaagtagccagcatgcatctgacagacatgcagttagacaaaggctcagtgctttaagcattgacagtgaagagagttcagtgattttatgttactttggagatgtggggagaaacagagatgcagtatctcaggaacattcaattttatgctttctctgagctataacatcatgactgcagttggttaagtttcagtgtaattttagtcattcttatccttattatctattcactttgtagcgcttttaaacaaacatctggcactatcttagttacctagttttatgtactttccacgtcccttgtgacttcatgctggcctcttgttgccagcctgttactgccctcattgtggaggaagctgagattttctaccaggctcagccatggaatagtgacaattggtgttcaacacaatgacacaaagcattacagcattataaagaactgttgaattgtttgaagatattttttaaaagtttaaaaatctgccttattggctgggcgcggtggctcacgtctgtaatcccagcactttgggaggccgaggcaggcagatcacaaggtcaggagatcgagaccatcctggctaacatggtgaaaccctgtctctactaaaaatacaaaaaattagccgggtgtggtggcaggtgcctgtagtcccagctactccggaggctgaggcaggagaatggcatgaacccaagaggcggagcttgcagtgagctgagatggtgccactacactccagcctgggcgacagagtgagactccgtctcaaaaaacaaacaaacaaacaaacaaaaaactgctttatttagggtataatttaaacacaataaaattcacccattttaagtgcttaggtcagttggttctgataactgcgtacgtaaccaccaccacaatcagcaaatagaacattcctatcactcccaggtttcttgtccttttgtaatcgcctccccccatccctgggtccaggcaagcactggtttacattgtgtcactacttttgccttttctagaattgcataagaatgggatcgcataataggtaatataagtctttgaacttatactagctctgtttattttttcaaactgatttgaatattttaagtcatttgcatttccatgtgtttttgaatcagcttgccttatgaaagactactggtgtttttattagaaatgcattaaatttgtagatcagtttgggggaaagttgacatttaatgatattaagctaatatatttaccatgtatctctctattttaaaagatctttagttttgtatttttttaagcaagtttttcggtcttcagtatacaggccttacacatttcattaaatttgtccttaagtatttcatggttttttatgctgttacaattatttgaaatttcaacttgtaattgtttaacaatgctatggtgaagaattggttagattagatctgagtttaaagtcatatactaggttaaaaaaaaaacaaaaaacaaagcaggaagctggtgcagtggtgcccacctgtagtcccaagtactcgggaggctgaggcaggaggatcacttgagcccaggagttggagtctagcctggtcaatatagtaagacccatctcttaaaaaaaaaaaaaaacaaagacaacaactcaacaaattttcaacaagttattgccagtctaaattggggtaatataacactcgttctggatttagaaataaaacatttaagagaagcttcagtgttcattccctgaatttcaacttttctgaactctttttgacattttaaaaaatgtagacaaaggatcttgctacgttgcccaggctggcctcaaacttctcaagggaggagatgctcaagcaatcctctccccttagcctcccaggtagttgagactataggtgtgcaccaccacacctagctttgaactcctcttagtaggaaactcttagaggatttacatattaagaacttctcatataggggaggaataaaattaatttccccacttgaactaagataataaaaaataaggttgtcatgaaaaatacagacctggtgctttaaaacattttagcatttgtagctgtgtatgaaaagataaatagcacttatataacagaaatgcataatgataaactgttgtttctagtaaatgtggaaacaggccatattactatgtatgtgacactttaaatatttaatatatgtgacatatacacaagaatatagctagagaaacagctagacatctgctaaatagtaccctttcctttaaaattactacacttcaaaaattcaaaaaatacacataggtgtttcataaaatcactgttgtaacagaatgacccacgtgctaataatttggtcataataagcacataaggagcacaactggctactttccctgaaaactgttacagtcaaaaagtaaattaatttagggaaaaaagactgaagatttcaaggtacggggtcctaaaagtaaagctactgctttgcaggttttgttaactgggcgcgggtgtgggggtgggagtaaagagtagggatgtaggcttacagacccaggttgtcaggagagcaatttgatgtggaaggcacaagtaagagaagatgtaaaccacgcaaacaaaaagtatttgaaagggaaataattcaattcagcaaatatttgagtgcatactctggaccgagattatagatagaatgaactataaaaagtccaaataaaccctccagagaatgctgagaccttggctttctgattctccacataagttaaataggccccacaggaggcccccactgcaacacgcagttggttcagtgctagattagtcatcgttagaagatggccagaattcagactgatctgaaaaaccaaagaactcaggttgcttcaaaaacccagagacagccaaagctcagaatcaactaaacatcccatgtcaactgaagaatgatggactgctttggtcatagtaagagggtcatgagaggggagggaggtgaagcccaacctcttgctagccaggggcctccctcctctgtagaaaacagagttaataaccactcgcctgagaggcctgtggtaggtcaaatgagatgccatctgtgcagcaatttagtgcacaggagatgttctgtaaacttcatctttcactgacactaatccagtaaacaggcatacctgacttgggataagcaacaagaaaaaaatgataatgggaagcaatgaggaaataaaatcctcacttcttacttgaacagcagaatccttaagaaatacagcccactcaactactagtttgaaagtttaaagtctctgtgatatcagttctttctctaggtgacttacataggatgaaaaaagtgttcccaactgtaaacatgggtttctgtatcaaacatgtggctgactctccatcagcaggagtagcagtggttaaaaaacacaagctaacatgttctcagctcttcctccaagaggtaaaagctcataagcccattattttcgtagtttaaaacatatattcctgattcctttctttccctctgccccactccccaaatgctgtctttaaatagtcagattctctgctaaaaatgccattcatgttgtcacaagttctgtattgacctggcatcagtgttgataattaattttcatgtgcttttagttggctaacctagttctttgccacataaaataaatgcattagtattttcagaaatatccttgcttggtgtataagagcaagaatgactgtctaagggattactcatgtcaggaatgttttatgattagaaattccccattagaaataaaatttttcattgaagcgattaacattaacaaaatctttaataggggactgcttagaatattgaagttttcctcatatctgtagaattttcacttaattatgacatatacaagtttttaatttgaagtcttcattgtttaaaacttttccttccaattttgataggtggtttaacaaaaacctaccaccttgtgtttccagtgtcattgttctcaagatgttaaaggcttagtattgtgaaattataacattgaagacaatatttattctcaagacaagaaccagtctaataattaacaaggtaactgacatttttaacgtctctgatcccctctgacacttgtgtgactcgttcgatagtcacataacgtgtgtgagaaggtgggccgtgcctgccttggaaatcattcctaacaggtctcgcatttgtccaggtaaggtcatccagctcagtaatgtcctcatttgtgtgagagcctacctgcctatatttagtctttccaggtggtttataattggtttagcccattggacagcctgctttttggttgatagaggctggggaggatgaaggaagtgtaaaggcttgaatttggcagtctctttgccggatatctattttaacccctcctgaagttaatttacataaaacccagctgtgtaagaatttttctaaatttaaagtttattcttattaccgtagggataggaatgtcagcactcactgaattatggccttcctctcctgtgtctggacctcctggcagcttatggttcccgtttcctttggataacaggatacagctggtggcaaaattctcacctgtggaatggccattgggagttttcttctccatatagatctttgcaaagcagcagaaaccatttttgcaggaaaccacaagcctgtgttaaacaccaaaagagaattgaaataacatgtccatgagttcctctttccagaggtaccaaccatcatgtgggatcctaagtatagtgttaagtagctctttgtcctccccttcactttgaggttgtctagttatatgatgttgaattccccagctctggtccctattacctctctggcagattaagcaaattgcttcaggctggattgcttaacacttagcagaattcatgctgcctttaatgagctaccagtttaaccttctggggctagagtgatttttagacatttttgttttgatgagttgatttttgtacttatagctataactgtggatcccttgccatcaaactatggtgcagcaaagcagctgatgaatttctctgtctctgatgttcatgtcaaacagttatttctctagcattcattgggggctcagtactgtgccaggtgctgtggcatgagcagtagtggtgtggagggtgctacaggagacatctgcaatgcagtagactagattaaaaacaagttggggagagaaggcaagcacaaaaataaaagaaaaatagaagatagtatttgacttactgctgatagtgtgggttagattatcagtgataatcctattaaaatcagcaagggtggagggcatgaacatgagcaaagacttgaggactggactgagcatggtgcatgcatgtgaggtatgcagggactggatggaaggtgtggtatggaagaaaagagtgctcagtaaggctttatagataatgagggaccctgaacactctttggaggcaccagaggggtagtgggggcatggtggatggcttctgagagctcaccaatgataaatggtatgtttaatagagtaccttatctgttggaatgtatattttcctcaccatcaccttttatttagaattagggatcgacacagtgatgaggatgtcctgagagatgtggtagctgaatgtgatagaaggttagtgctgaaaggctatcatgtaattcataacaggcaagaagaataggagcttactttattattttcttattgcctaccactgtgttaaacctttaactacacatctttaattttatgtattctcattttacagatgaggaaaataaagcttggtagttaagtaacttgtccaaggtaacacagccagtaagtgccacatttacaactcaattctaggtctttttgtctctgtctctgaattacgttagtactctaatttttatccttacattagtctgttggggtcatcaaatgattcttaaatactagaaggttgtctctaatcttaatgaggactctgcaatcatcctttcctttaataactattcatccaagtggcttgtctatcgttgttgtaaaataagtacgtttaattttttacagaagaaatgtagtgggcttaatcatgtgctggccatgtgtgtctgtggatgcagcatttaggaatatgggtcccagagtacagggctccatctttaagctctggaggttggaagctctaggaaaactaaggtgggttaaatgtgttcccaaaactgtgatcacattttatgtttatgcttttctctccctttctcgagtcatggtaggttactatttgagtgccatgccctagaactccctaaagtaaaggcactggtatcccaaaagaactgttctaaaagattacttacttctgtgaaggcagagagggtgctacagaatgaaaatagcattttaggaaggttgagtcagaggtgcgagtggggcatagagagattttctcagggtgataaggccctggtgctcaagtctacaagcagagacaggcacattggcagtgagtcctccttggggaagaagaatgatctgggctacttccaagaccccttctacctgtaagttcttgtaatttgggattgggattaagaaactccagaggctggtgtaaattgatggggcaccagctgttgtttgctgcacctcagggaagtcatggtgggagtctggcctggccctgttggctggggcccccaacagatccttgctgtgtctgggtttgagtttacgctacacaattacaaactttttccagtgctgctttttgtgaatctttgaacctgcagttgtgaatgaacagaaatttgaactgagcttaaaaaaaggaaaaaaaaaaaaaaaaaaaaaggcagagctttgttgataccactgccattatagggccatgatttcttttttccccatttagctgcaacacatttatttttcccttgtataatggctgagatttctttagtatggagctgtgtcacagtggtttatgtattttcttctctctccctgcctctgtttctaaggctgggcaactttgaggtatgtggattgacctggatgcctcttgtgactccttccccacgatcccctgcgtgcacttcctattcatctttgtagttctcagctactcactgtgctgtcatatctggcgcgtgctgttccttctatcctgtgcttctcctcctgtgtccacttggtggaactttccccatggtttgcttcttccagtaatctctgtctggaccccccatcttctagagagtttattgctccttcctgatccttgtaacatttttattattgtgctcatcatactgtaatatctgtttacatacatatgaccctttactaaagtggtaggaaccacatattatttattgctaaagctcaataacttagtacatgtaatattttaggggctcagaaatgtgaaattatctccctttattgagtttttatgtgccaggcacatattataaatatatgtcaagaaaaagataacctaaacacggaaaagattatagtgtactctcctacacaactttcaaataaactctaaaatgattataaggatgtcagagttctgattttttaaaactacatttaacttactattttaaattatttgtatttcattattgtaagagttctgattttttttccatgataattacattgatttggtgtttgtgcatgtgtttggcccaaactcaggatcatttatgccttttgggtaatccagcgttgataaagaataaattaaatgagtgaacgtgggtgttactgttttgtcgttgctgttgttttaatttgctatgttcttttgttttactgttgaatgttaccctgtgttagactcttcatttccttcatgtcatgcctgcctcctttgtcccactcccaacccctcgccttacccatttgggctcagtgctttgtgttttgtcttggtggctagtaagtaccatcatatgatagtggggcagagcagggctaactgttccgtatgagaatcagacacatattatgagtcttaacatcatttcccgaagtgtgggtcatgattccagagcaaaggatcaccagatttggtctcccgatttctactctttctggtcctgggaatgagaatcagccttatttaacaaggccttaaactgatgttcatgtgtactaaggttcaagaatcgctgcttaaaactaactgctcaattattaatgtagctgcaaacaaaagtaaagcattcatgagggtcttgtaagacttcctcagtcccttattcaggaaatatatttggcccatgtggtattttacttttttgatagaacttggcatcttcaacaggaaaagcgtatttactttttgtatcctggtcttcttccgttgttcagaatttctagctcatattcccagcctccccaaccagggcataacatttttatagccaccagcccaggctccgtgggttgaaggaaagagtttttggatcctgttattttcctggaggaagagctgaacattgactcttttacaagaatccaaagtatgcattgtcatttccatgttaaccctcactcgaaatttttgtgggttttgaaggattgactgtagcccagtcttagcaggatccctggccatggaaattcatttgaagcacattgtgccatggaagtaccctgcaggtaaaaatgctctatttatacttggctgagtcccagacagctgctgtctgcctgttgggactgggagcagatgtaggggtgatctgccccctcctatttttttgtggatttggaagcttccctgttgagagtgacaaaaaccctgtcaattgatgtggtaggtatgtcagacctggacagctggtccttagaaaatatgctgagatcaccaagttaacaggtacagaagggtttccagtttgttatatgatgttgggcctgtgactccccacccccctttttagggacatgtcattaatggtggagcgcttgttaaaggcttctcttgtagcatgtgtaggtgtggctaaagaatagtgaatttgattgatgttaatgtacatctggatacattctcattttaatttttttttattggttctagggacttttggtaaagattgtggatgtcttcagttttacacatttaggaaacagtgtctttttacttatttccagtacagttgtgatgtattgaatgacaagggactttaaaacagacatgctgtgtataatgttttcttcctgattaaaaagtaatatctgttcattatttgaatagttacaattaagaaacagattatttagggatgaaaatttcctgtaatctccagagatatgtacacttaacattttggtgttcgttcctccagattcttttctatgattattgtattatattttagaattgtagtttacccaccagcgtattttaagaagttaccagaaaggcgtctctgagtatctgaagcctttcatttagccatttatggatttcaaagtatcttatgtggggttagtctccattgagactcaggaactctgcaagagggagaagcattggcttctgctatgtgcctgtcagtgtgctttaatactttacctggatcatctcttccagtaaccccacagtataggaagcattattatgctctttctgcacataaggagatgaagattcagacaagttaagtgacttgctcaaggtaatacagttaattgtagaggacttgggattgaatttgatttattgtctagagaatattgtatggcaccctattactttcctgtattgagatgtaggtggtgggggtgggggggttaagctgaaaatatctgtgagatgtataaagctgttggatagagacacaccatttctttcttcttatttttttttgagacagagtttctctcttgttgcccaggctggagtgcagtggtgcaatctgggctcactgcaacctccacctcccaggttcaaacgattctcatgcctcagcctccccagaaactgggattacaggtgcccgccaccacacccggctaatttttgtattttttgtagggacatgtatagtttcaccatgttggccaggatggtctgaaactccttatctgaagtgatcagcctgccttgacctcccaaaattctgggattacaggcgtgtgccaccgcgtctgtcctaaggagacacactgtttctctggcttattaagaggtatttggttagtatataaacattttcgtagcttctgaggttttgcagtcatttgttcagacatacgggttggtggaaatgctttctgttccttttcccaaaccaatcacacagccatataacttcatgcctgagtttctctgtggtcctctatagtgagtggtttttacatagttctttgcagcagcatgaatttcaaaaatctccaaacttttgctattgctgatctttgtaaactttgcacacccagcgctggtacattctgatgatggtgtccacactgcactttatgaagaaaagactgatgattgtttatattaaaatgtaggaagagaattgtagcagcaacttttgcttctctaatcaacaacaccagaagagacttactgtgtgtggtcagtgggggagaatgttaatttataaattgagatagttgtattaaaattgagtgactcttattttgacataaagtgaatgtgtctcttttatacagcagaaaactattaaatttgttttttctcatcagtataaaataaagtggaaaatgtgggaagaatacaaattcttaacttctgtgcttctgcttatttcacacccctcaaatttctgattcctttcaactgtagctggctttactactgagtggtgaaattgctgaacatacttaaaaccacatcatttaagactttgaattttgacatttcctcctcttcacagtctttaaatactaggcaacctgtagggttccactgtgtctgtcatgtattgtccctgtgttacatgaaagcagcctcagtgaacttgtgaatttgctcagtcatttcactggctactgggtgaggaagaagtaggattttctctcttaaaattccttggtgaaatcattggatgggcatgatgtgtttctttaattttcattttggtaaaaaaatctactgacaaagcaaagactttcagttgttcttggtctttcagtaggtttagtttttaagtgtgtttactctgaccaaaaactgccttcctgtaatatgctcctccctttagaactcagttcttaagtagagtttgtttaaatgtataaaataagttaatgcattatatgcagcgaggttttgcatcagaaccctgagttctcaatgttgtggcaggtttaagtgtctagaacaccttttagctgttatttctattacttgcttttttatttttggggtaaatgatatcttctcagggaggccttccctcagcaccatgttttaaagggcatctccctcatttgctattccttcttctgttttatttttctctatagaatttgttactgtgtgaaaactatttattttaatgttttatttacctgtgttacccctagaataatatctatgaaggtagggatttttgtctgttccttctgtgcctacagagtcttgaggagtatggtgtctggcacattgtaggtgcacaatgacagctgaattaacaatgtcagggagagtttgtaggatggggctcgaggtatagggcaagtcagtttttagatttgaggtcattagcaggagatcctcttacgatgtggggggaaaaacacacgttttaacgtcagactgggtttgaatctggtctctccaacttaccctttgaccttggtgttaaatgatttaacctttgaaagatcaatttttttcactagtgaaataggggaaatagtatctttttagtggggattaaatgtaatatcaaatataatgctctgtaaatgttagttttgtctttcccgttgtgtgccagcattgtggaagtctgaaagcaacctgaatttaccagtctgtttctggagccttctggggtcattactttgattacttttgacagatacattcttttcagcagcctgtgttgccagcataacaatgacctgtccctttgaccagtgtgagggacagacactttgtcatccctcttttaatccttgtatcagaacaactcttacgagttctggttttgaaacatgtttagaggagtttataattccgaacagttcagatgacatcagccctttcttagagccctctaagtttgctcagcttcctcattccagtgtggcgggaaccattcagttaaattgatgtttgtggtctttacacatagtcatccgaagtttcttgcaaatcacgaaacatcagagggctgctaagtcactagtttgtctctgtagatttctctaatccaggcttgtccaaaccgtggcctgcaggctgcatgcagcctgtgaaggctttgaatgtggcccaacacaaattcgtaaactgtcttaaaacattggctgggcatggtggcttacgcctgtaatcccagcactttgggaggccgaggcgggtggatcatgaggtcaggagatcgagaccatcctggctaacaaggtgaaaccccgtctctactaaatatacaaaaaattagccggttgcggtggcgggcgcctgtagtcccagctactggggaggctgaggcaggataatggcgtgaacccgggaagcggagcttgcagtgagccgagattgcgccactgcagtccgcagtccggcctgggcgacagagcgagactccgtctcaaaaaaaaaaaaaaaaaaacaccaaaaaatcagctgggtgttgtggcgggtgcctgtaatctcagctactcgagaggctgaggcaggagaattgcttgaacccagaaggcagaggttgcagtgagccaagattgtgccactgcgctctagcctgggcgacagagcgagactccatctcaaaaacaaacaaacaaaaaaattatgaaattttctttttttgcaattttttttaaagcttatcagctattattagtgttagtatattttatgtgtggcgcaacacaattcttcttcttccagcgtggcccagggaagctacaagattggacgacactcttttaatttttgtggcttaacaaggtgttaattcctgtataaatttcactgatatttcttctgcttgatgcaggaacacttgacaagttagttaaggtagattggtccataaatttataggttctttcattcccatgtcctaggcaagtctgagcaggccctggaaagctgattaaaaggccagtgagcacagtgagcttaattgtaaattaaatggatatttaatacattaagaaggcactcaagcctttcaatctttcattttcatccatgcttgctgtttgaatctgatgggcttgaaattgactttgttcttctaaaaatgttggttggttattgctgcctttctcaagcttggttttcagtgtggatttctgcagataatttttgcacctaaaagtacaaagtcattaagtgaagatagtcaggaaggaaagagtgccctgagccaggaggtctgttatagcgcatggggtggaccagagaatgaatgggcatgggcatggaggtggttcagtcagtgtgggaaagccacttgcttgtcagttttctactgcgttgtccagcagaacacgttgaagcttggggcctgcaactggtgtggagatgattgcatttaggaggctgatgtagatttttttccctctaagtgtgtgttaactgccttttggtgaagtcttgatccgagacatacacaacttgatctgtgaggattgtaatatcgagatggttctgttatttgagttaggcatggctaggctaccaaggcattgcttttcagtcccaacagttggtcatttcaatttcagtgaggcttttgtgatttgttagaatacaaagtttgttattttgtctgtgtttttgcatgtatgaatgacactttatactgttattttgctggttagtatgtgccttcatttacctattgtgagtaagaaacttcctcagatcaaattatagtaaagtcacttggttctgtttctctgactcttaagagattgagatcactttatactcaaactcagggtgtttggtaaaggacctacccttctgagcatttatagcctagatgaagtcctggtccaatcaccaagttaaacttttaagaacatgctattcttaatgttcaggaattcaaccctggaagccttctctaaatcttaatgagatttttatgagaattcatttagtgaacataacaatcagggaatccagctattaactttgaggagggtcatgccttttagtggttagagaggcaagctgtagcctcccttctcagagaaggggaattgaggaagagagttctagtggtcccttgcaatcctcccctcactttccaggctccctagtaagactgcaagaagtccctgagtaaacagcattttgtgagtttgagggactacgtaaaaatgtaagtgaacatacaatggttttgctttgataactgttttaaatatcctgttggttgttgaaacttctgtgacagtgaagccttttgtctttatttttcaatcggaagatctttcttccccacttgaaaagattgagtctgggatcaattcctgaccccgcttccttcctaaatctcttagtgtatagcatacagctgggcatatggtaatctcgggcacgggattgtactcacagagctatgcttgacacctaggactttaggtggcttatatattttcggtgacaacttttaattttattctcatttattccatttctgtttcagtgtcctgggtcatgaaacttaatccacagcaagctcccttatatgtgagtaaatcatgagatttcttattattttgtgtttatctgttctgcttacttgttataataagccacactctcacatgatagatcctcaaggaaaattttaaccatatgtccatgaatatattggtgtaagacacttcagaaattgagtttgatttagtaaatactaaatggctaatctgtgcatggaaatgaaaacaaataatacctgtaagacttgagagttaatttagtcagggtaatagtatgcatgtatgaaacaaattgtcctgccaaacagtactgtagcttcttattttttacctgcagtgcattcctgtaaaagtagtgtggagatcctcctactgccactgtgatttaccttatgttgccactaggtggcactatgtcattggcaagagtactgttttctttaggactcatctccctaaagtgagggacttccctcattcagtgggttgtcatttcactttcttgatgctatcctttcaagcacaaaaattttcagttttgataatgttttgttgttgcttttttttttggcatcatatctaagaagaattctttgcataacctaaagtcacagagatttattcctatgttttcatctaggaattgtataggtttagttagctcttacatttaggtatgtaatgtgagagttcatttttgtgtattttgtaagggaagagtccaacttttttcttttgcatgtggatctccagttgttccagcaccatttgttgaaaagactgttctttctcccattgaattgtcttgggcatccttgttgaaattgatcagaagtgtgaggaattttttctggactctgaagtcgattcctttcatttaggttgtttttgatttctttcaacagtgtttggtagttttcactgtataaacttggtacttccttgaaatttgttgcttatggttttattcattttgatggtattgttaattttgttatcttaattgttcagttcttttttttttttttttttggatggagtctggctctgttgcccaggctggagtgcagtggcgcgatcttggctcactgcgagctccgcctcccaggttcacgccagtctcctgcctcagcctcccaagtagctgggactataggtgcctgccaccactcctggctaattttttgtatttttagtagagacagggttttaccatgtttgccagggtggtctcgaactcctcacctcgtgatccacccagctcccaaagtgctgggattacaggcgtgagccacagcacctggccaattgttcagtttttgattgttcattgcttatatatagaaatactgttgatttttgtgtactgatccctgaaactatagccttgtgtcagagatgagttacaaactataatctaacttgtttggccacagtttttaagtggatgccttaggattttctctgtacaggatcaagtgatcagagatcgttttcttcctttccaatctggatgcgttttatttctttttcttgcctaattgccctgagaagcatgtctggtacaacattgaatagaagtggtgagcgcaaacatccttgtcttttcctgatcttaaagagaaagcatccaagctttcaccagtaagtatgatgttgttaggtgtgggtttttcacaggaatcttttgttaaatgaggacattcccttctattcctagtttgactatttttatgatgaaaacatgttggattttgtcaggtgatctttctgtgttgagatggccatgtaggtttttttcctttcattaatgtgatatattacattgactcaattaaatagtttttatttatttatggagatggggccttgctctgtcacccaggctggagtgcagtgacatgatcatagctcacagcatcgtggaactcctgggatcaagggatcatcccacctcaacctcctgagtagctaggactacagatgtgcgccaccatgcctggctatttatttatgtatttattgagacaaggtcttgctctgtcacccagcctggagtgcagtgacatgatcatagctcacagcatcgtggaactcctgggatcaagggatcatcccacctcagcctcctgagtagctaggactacaggtgtgcgccatcatgcctggctatttatttatgtatttattgagacaaggtcttgctctgtcacccaggctggagtgcagtggcgcgaccatgactcactgtagctgcgatctcccaggctcaaatgctcttcccacctcagcctcctgagtagctggaaccacaggcatgtgcacccatgcccagctatttgtatttattttttgtagagacgagatctgactatgctgcccaggttgggctcaagtgatccttccacctcggcctcccaaagtgctgggattacagtatgagccatcctgcctggcctgttttaatttttagagataaggtcttgctgtgttgccaggctaccttggttgaatttttaatgttaaggcaacctggcatttctgaggtaagtatcatttgataatgctgcacaatcttttttatatgttgttggatttgttttgaaagtattttgaggactcttgtgtctatacatagagatatgttctatagctttcttgtgatgtctttgtctggttttgagtattaaaggtttttggttagggaacagttgtaaataagtagttgtgttatacagaaggatggcttccccaaatttattcacttcttaatccctagaacctgtgaatatttaccttacatggcaaaaagaacttttcatacttgattaagttgaggatcttaagatgggagcttattctgaaatatctgagcttcccgttgtaattacaggagttctcatgagtgagagggagtatcaggagagtcagtggtcagagatttgaagatgctacactgctggcttagaacatggaggaaggagcccatgagctacggaatgcagctctagaagctggaaatagcaaaagaacactttctccacatagagactctagaaggaacacagccctgctggcaccttgatttttaaacaagtgaaagtcattttggacttctgacttccagaaatgatatatgataataaatttatgttgtcttaagccactgagtttgtgataattttttgtaacagcagtagaaaactaatagagtagtagtttgagaaaattagtgataaaggatacttgggaaggaaaggataaatgcagttaggtcagttagaaactctctgatcttgccatcatggagcctgagaactttagagttagtaaatactttagctaatatatgcttcaacctctcccttttagacatgaggaaacgaggtctgaagatgttgtgataagatggcacagctaattggtggtaaattgtgaattgaacctttgttttctggacttaagtcatagaaaccactgtaaaccttgttaagctttaaaaagtttcattctgttagggaagcacagctcagttctgagtaacatagttaatacactaagtgctttgtatatgtttgtgtttaattgacttgagcaggctctactgaagaatacttctttaaacttcaggattcaagtatgtccatcaacagtaatacttaatggggcaatatgttatctcctttttaaaaggagagtaacagtgtattggattctcagtgaactgagtcaagttgcagggatttatgctgttttggtgaggaaaagtagctgttttatgatggctcattgagcagggtggtgggggaagttctctgcacctggacaaagaaataagcaagagaacaaagactgtgaagattttcatttagatcatatttgggatctgccaggggtgagtatcatcattagaagggagaatattgctgctaaataaggaaaaacactgtacccggagaagaacttttatctgtcagttaagacaaataggctggactccaaataaatattttaatcagactttgaataaagatgtgtccagaatacgttgcaatagttaaaaatgtaaggaaggttccaaagtgtacaggtggcagtactgttggatgtttcaattaagctcttttaatgaattattttcaatgaaatgttcaccataaaatgtgcaggaccctggcctgaaactttggagaccagtagctcaatatggctatgccttggttttcctgtctgttagctctgattgcatgagtacaacctttatgttaggcaagctagttacatcactaagtcgggtttttctcacagtcgccacaaaagtaatgattattgccagatgaattcataagaattgcattttcagttccatttagtggtagtgctaaaaactctgagtagcttagtagtatccttcttggtatgagggcctggattgtttagagagaggaaagatggagaggcagtggcagatgcaagaaatatttcaaaagaaacagcagggccaaatgctttattagactatagggagtgaaagagaaccatgaatgacagttgattgagaacttgagtgtgagtgacagctgatgccatcattgggtatagagaagaaggagatgatgatcttgttctttacacatgttaaataaagtcacatgggtatcctgttcataggtggaggtgtgtgcttgaaactacagagcaaggaagttggttttgaagtgaaatcgtttgagtcttctctaagaaattgattcttttgacaccatgtgactgtaagaatagatgagctctttgagaagctaaaagagtggatggaattagtatagtggactgtggtgtagaagacaaagtgagtcaagaaaggagttccagaaacctgggttgcattttagccttaaacattttgttcctggtgtttcttaatttcacttatacatcaggattggaagtaaactttgggctggagctgggcaatttattcttttattcaggtgccttctttgtgccaagacctgttctggatgctggagatttagccatgaacaaaacagaaggtccctgctctcctggtacttgcattgtagtgagaagaaggaagacagcaagataacatatcaggaagaaaagttctatgaaaataaatgaaatggcgatgtgattgtgcctgaccaggggctgttttatcttgggtggtcagggaaggcctttgaggggcatgtcatttaggctgagacctgaaggagccagcatgtgaagctcctagaagtgttctagcccaagggaacaaatgcagaaactctaaaatgagaagtagtaacttaatatgtttgaggaacagaacagtggctggggcttaatgagtgcaaggggaaggggtccaatctcttctgcatgaggttggagatttagggaggagatgaggaagaagctggatcttgtaggatttaacagaccactggataatctccctgggcctaccttccctcacatctgaaccctactacagctcctatccctgtgtgtactcagaaaacattagagctccttctggcttgaggtcaagtcagacctcttagggatactgggatttatcctaatgtggatctgctgaccctgggcagatgggattcttagatagtttaaacatacatattttggactacccttttgaggaaaaaatagttttagtcctttctagttgtcattaagatccacatttagatataaatggatgttcttgaattgaggaatatgtatatatttatatatatttattatatattatatattatatatattatatattttatatataatatatatattttagcagatttggctcttatgagaggacagtgtaataaagaatacttctttgtttttatattgtttcatggctggattgctttttgggaggaaaaaaactattttcaaaacttggtactgttactccatttgtgaacctgaataagtggtgtataatatgatttaatagtagtcctttcattctctagttttctgtgggtactttacctgcagttgtgtaattcatttgcatcacctgtaacctttctagttgacagctccttaaaaacaagagctcatgtttgcatagtacctcatagttaagaaagcacatttgcatgccttacgttaatgcatgcagtgctcacagcagtgttaccagtcccagagcagagaaagctgcatcgttactttcgtcatacataaggaaacataaggttaagacggttcatctagtgaatggcagaagtggggctttacccagaaatggttactctgaaattcattttcattcttctatataccaagatgtcttattacaaataccaagtccacaactgttccataagatgcaaacatgtcatagcacttaatattatagagacttgcagaaataaaatccttttaaagaataggtaacccaagtttactcttccatttcatgttttaaaagatttaatgggttttatttgaaataactccaaggccaagcacagtggctcatgcctgtaatcctagtaccttgggaggccaaggcaggaggatcgcttgagcccacgagttcaagcctgcagtgagctatgaacataccactgcactatagcctgggctacagagcgagaccccatctcaaaaaacaaaacaaaactttaaatgtacagagaagttacaagaagaatacaataacttcacctctatcaactcttgttaaatttagtcacatttgcttattctctgtattacatatttttatttattttagtcatttgaaagttgcaaacagtatactctgttccccttaaatatttcagcatatatttcctaagaatgaagacattctgcttcataaccacagtataattaacaaaaaacaggaattgtaacattgatgtaatactcttacatgatgtaagtctatattcacatttctctaattttcccaataatgtccattatagcacccttttcctttttcaatccaggatttaaacacattatatctctttagtctcttaattttattttgtagcatgttttgtcatgattttggcaatggactacatgagtgatgttcttggagtatcacattaggaggacacatgatgtattcttttccaattattggaagtgttaactttgataccttagttaaggtggtattgaatctacataatttatctgttccagaggaattgggcatataagagatggtatgagtagttgttcactttccccctctaaagttgtttctggtttggaggtatcttttgcatattggattttcctaaaatggggtacccttgttctgcgcaaggtgtacccttgaatataggcgaaagggctaatgtcaacagagagctcattttgagtgataaattgcctgaggtttaagggggcgttgtctctgcctttgtggatacacatggttatttaagaaatgtaatactcagctgagctataatgaccatttttaatatggaacatagtaggcacttagtaaacattcattgagtgagtgaatgaactacagtttagataagactactaaaattttaatgaaattcacttcattttgacagagctacttttcttaaaattgctcatttgtttcccaggtttcattcattaatctgcctagcataggccctgagtagctagtgatgtcacctttgttactgaaggtgtggccaacagggaaatgaaggtgataaccttgtctttatggtgcatgtggaacctttgaaactgtaaggaaatccttacagcatccctgtgaagtacagctgagtgtgtttgatagttttattacagagatgcattctgtgagataatatcttacctagttgaagaagcgtactagaaatagtgcctatatctctccagtcctgaattatcttagttcttttgggagttataatctgagccatttgtttatagcaagccatgtgactgcttctattttttatgaacatagtacatgccccctttgtctctagagctctcctcactgtcaagatacaaagcatagtcttgtcctagacggggtaagggacgagggatgctgtcagatgataaaagaaaaagccaagcacatgaaggaaaggttggtattaaaaaatgtattacatttcttaaataaccatgtgtatccacaaaggcagagacaatgcccccttaaacctcaggcaatttatcactcaaaatgagctctctgttgacattagccctttcacctatattcaagggtacaccttgcgcagaacaagggtaccccattttaggaaaatccaatatgcaaaagatacctccaaaccagaaacaactttagagggggaaagtgaacaactactcataccatctcttatatgcccaattcctctggaacagataaattatggagattcaataccaccttaactaaggtatcaaagttaatgggctctatctatcaccactcccacactctaagccctactggatctagcaacctagcaactagactccagaaacagtaaataaatcctccctcagactaacagctgaaaaggaaacaagagttttagacttctgatgaaggaggaggaaagggtctttggatgccccttatgtcaggccccaggcttagtctggaagagatctgtctaggccaggcctgaagctctgcaaggtacaaggaaataatagctgtcaagaattaggcgacgtggatgaatcccatacttgatatgccagagaaagtcacttcctctgtcctctcatcattttactacacccaagtgaatgtcccacactcagttctacatgtaggaatggactttatgggagaggtcaggactggtgacgaatttgatgagtcataggaatcattgtatgttaggagtggttgagcccagtcttccggaagagtgaggatattgaactacagagagagattgagggaagttgcctgcagtttcacagcaggttacgagaggtctgaacaggtagcagaatctgcaaataattagcttatctggtgtacaggaggcaggtccctaattggtttgaatttaatactcaaagtacatgcgcagagaagttatagtataagattcagaacaaatgggctaagtaagagaaaaaaatgtagcaattggaagatgaagaagagaggaatattcaaaaagatagcattgtgctcctttcttggtggagtgaacaggtgaggattatactgtctttatggattataggtacattggaaaatagtttacagttattatttgaaattcctctatagtgaaggaagtagtcaagataaaatgtgttttgtgacttttgatataggaaagtcagtaatagccatctcaataaagtatatgctcagctatttcatctttatacttagagattcctcaagaggatggttacacattagctctggatcagtgagagtaagaccaaggccctggaacagtaaggctttctcttgtaaagctcagttcccatggttctttgatgctttttctgtgttagaataatgttctttactggtttccaacatgtttcggtgggcattggacccttgtggttaatgatctgtgcagctgtaactccagagtggctggctctacagaacactgactcagatggcttgtattcgatgctgataattcactaactaaaacgactataagaacacatttcaagaggagaaatttggggtgcatatctcagattcttcagttataaacttgcttttttgtgtctcttaagatttatggtctattgaacacatctctgtgtctccctcaggaaagccaaacagcatatttttgcccctgcaaattaaacactttttaaagccagtgagttactcagatgtgagatttcaattttttccaaggcatgctcgaaggtaatatatgggataataatcattacctgccatatgtttgggataaaacccacacttattagattttcaaggggaagagccattccaattataaaacaaatttccagaaccccaacagatctggttgattatgtcgtccttcctctcttgttttctctcagtaccaaatgtttttgcatgtaactgcttctgggaggaggcaaaacatcctgataatagaagagcaccataagaaagaattatctggcactagatgcctttctttatttaaaatgtgcaaaacaaaatctccagtgattttaaactgtttctattagaatagggaccgttccttatgatattgttctgttttcccaaggaaaagttagggtgctattattggttgagaacctactcttggcaaggaaacatggccagcacttaatacacattacctgatttaatcatgacaatagacatatagggtttggttattgtatccactttacagccagggtggatggtagggttcgcatcctgtgagtggctacaaagcacccccacctccttttttccctcaaaagcccatttaaagaagggaaatcagaagagcgtatccactggacttgcatttagatcttgagaaaagcttatcagagtgattttctaccaccacattgggttcctgtttactccagacttacattttcagcctccgtgaagacttggactttgcgcgtagattaacttgcttctctgtttatgctaattaaaacagacctcagaagacgagcatgcaaacggagatactgtgattaggaggaggaggttttaaaatttttatcagttaaaaaaatttattcctgaacaagtgtagtttgcataaataatcaaatttttgaagggccacagaaattaggttacctcagcttagtgttctcagttgcctccttatagggaagactaatttggtaatggcacagttttatcgttcttcctaggaaatgcatttccacagcaggctctgaaataacctggctgtgcttctcacttggctgttaggatacattttgcttatacaaagagccttatcagcctcctgatctcttaaatggattacctgcctttgccttaacaatacatttctgataggtctgctccagcatctgtgggctggtggccttgtccagccagatctgagacctgccagaagaataaggaaatcaagggttcctccgtctagcttttgatggttttacagagcaggaatttcagtttctttctgttggactttttaatcagtttccagaaacttgctttgaatttgaagttaatgggcttttcatttgtaagtagtattttctcatttttccttggcatttttagaacagacaaaggtacaaaggtcaaagacttttcagagcctttttacaggatactttttcaataactgggtgtttgccaagctatcacataacagtgaggggattaaaatttccatttggtactagtgaagaggagtcttgctgtccaagaaagattaaaatatatcactctgtacctttaattcatttaaaacaagtatttgtgaagcacctattaggtgaatgggacatttgatcttagaggaatagattctttcactggggaggaaggggctcagatgcatgcgtagataaattacagtgcaaggaatacctgttggagtgctgctagacgagctgtgcaaacagtgattgttcatggcagggagagaggaatggaatattggcagatgtaattgggaagctttcagaaaaggtgggggctctaccagcctggatagataggctgtggagactgggaagagcagagtgagaggaggaagcacagtctttggagtaaggcatggaagagtgttatcagttgtggggagagactttgcttgaccagggtgggcagttcacattgaaggatacctggagatgagattatatatagctgctctgtttagtaatgtagtcattagccacatgtgactgtttaattaaagtgaaataaaattaaaaattcacttcatcaaatagtgctcagttgctacacatagctagtggctaccatactgattgcagatagaaaatatttccatcattgcagaaaattctgttggtcagcactgataaaggaagtatggggttttacacaggataacagtgtgaagagcaactggagatcttttgaccaggcaaatagtagcatgatgaaagtcatacccaaaataaagagtagaaggagagcagtgaggggctgtcaagtaggtaggcctatcacttcaccgttacagcacacagaatgagatctggggatgatgaagctgttccgcaggaagaacatatggattttgtctggtagaatgactgaaaacctcaaggagccacagaatggccactgagggttttagtgtgagggacagagggagaatggtgtagcatcaatgagcaaacagtttggaggaggagctgccttggaagcctgagggagaacagtcatgttttttacaacaatgtgtggtagtaaggattaaatgaagtgagatatatatatatatatatatatatatatcacattgagcgagatcatagataaaactttagatataggtggttttaaaaagagacgtacccccgttattttgacatagtgcatgtaaagttacattgtgtggcttcgtcttgcatcttctgcataaatacttgcgctgagagctctttcccttgttagcttaggtagcaactaccttttactgaacaccttccttgtaaggtaacttactttatctcctcacccatgtgagatccattttatagatgaacgaacatagctaggaagaggtgaagcggtaattcaaactaaaaacttttgctcttcccatttcatctctgcacgtgaggatggtttcactatcagctccccaggttgatactattgaagcttgatgcttacatcacatctacatttagaggttgtctttggcactgaactctatttaccatctctttttcaaatgtaagacatacatcctataaaacttgcttactctcagtggtaattggtatgtggggtgacctggaatgactgccatctggacttctctagggcgctggctcttggtgtgaggtccgcaaccagcagccacaggcatgagcaccactaggaacttggtagaaatgcaggtgtttacgccccatctcagacctaaatgccagagggtggggcccaaaaagtcactttaaaataagcccttcacatgattctgatgcactccaaagtttaagcatataaaccaaatgaacaaagaggatagttttgaaaagcctcctatgaattaaattggaactgtatgggtacatttacatttttcaacacggctgactgtgtaacccatcagcagtggttgcctgtaaagatgcatgggaaagtgtatatattaagtaagatattatttcagaaggacagatctatggcttttcttttttaaaggctagcttcctgagtaaattatcactgcgttattgactcagaataatatcaaggtgtgtactatcaaatacagggttgggtatctctttgtaagagatagcagtgattttcagtggataattaagggaattagcacttcacatttttttcatgatatttttatgtcacttagaatttttcacgaattattccttgtatgattgtagataattaaagccccatatgctttgcagtagtagcagcagcgcagattatgatgcagatggaattggtaagagcagtaggttttgaaatgaggttgtagacgggctgctgagactgatttttggacagcataaatgaaagcagtattctgatgtcagcatttggagtttaaaaatccctagccatggatcccgtgctgagtcattggtacttcaggtaaaccaattccaactctatgtaagctagccttcagccatgtgaaactgttaacggcatctcttcctctctctgaactgcacccccgagccctgccaatccctaacacatgcataaagaaaaacacttatctttcaggattcatttcctgccacttgtctctgtggagcccctcctgagctttcatcctcctgtggatccatcactcctactcctatgccccggctactctgtgcagactttgtaataagagcttgagcacttcagatgcacatttgtatgcatgccttttccgtttattatgttccttgagggtaggggctttgtatttgaattattattttattgctctcatttttacttcagcttctatcacagtactttgtgcatcataatgctagtgttttttattgtttccaagtagaattaaagctgttctttgggaaagggtgttgcctcatacatggatgattataaatgtctgatttgccaaagatgagagttttctttttggttaggatttatgaccccaaagggaaggttactgtagttcatcagccaataaatgaaaccacacagggggattttgtgatctgggacaatgtgtcactttgctttgatctttgggtagagcctctaagaggtgctctcctagtgaaaacctggaactgatactaggtgaaaaaccggatttcaaccactgtagcctagtgcttccgtgtggtgtgtgggtatttacttggaacactctgtgtttgcttcttactacacaaatctcattttattggtctgacaaacctatgaattaggtttgagacaggaagatttatattttaaagttctagtatgttgattgtaacattttcattgctctctttggaaattctgtcacctgagatgagactattagctagattcgtgaagtcagcccactgaatctataattcagaaatctataaatagctcccttcaagtacaacattgggaacatttatttatatcagcacggaggtagaaattacatttttctggaggatacacgaatttattgattgatcggttggtgatgcacatctttagtactttttcctcattcagacacatttcccccccagagattctgcttatttccttttggatccttttatgtgggggctgtaacttagggtatttatctttaagtatagagaatgtcacctgtactcccagaaatgtgtttgtttgttaccctttttaaaccaggaaagagctattggctctggtgtctttggagcccttcacaaagctctgtgtctggattaactgttgaccccatgtgatatacagagcatctggcggctggggtggaattctcagctgtctctctttgttttgtccacagaaggaaatgtgagttttatcttactgctcaggcgatggtacattccttttttggttcatgggactaccaccaatctgattgtgggagtatttcctaccattcctgtcatcttccggaatttgttaaagaaggccaggggtgatcttcacctaccatcactcgtgaacaccattttcttctcaatcacctcttgtgttcctaaattctactttgagtgaagtgtattattgtgtagtttgtcctgtcttgtatggtttagggatcccaggcagcataatattaagaagctacaactgtgggtatttcttacagccagtattgttcctccacaaatcctcattttccagatccctgtgaaatttattatattcttgccaccatatactcgtgattatgtgttgcccatatcttgctaagtctcagaatacaaagtaattcttctccttgaccgtgagacagagataggtgtttttaaaaatgaagtaccgatatttcagtttttctggtgagtatgggacgttgatttttcatttgccatactgtatatgtgtgcatttgtatgcagtagaggttggcagaaatgtgtattgtgttcaaacgctgatcttaagcctctgtttattccatacctgctagtgcttatccactatgctatatgtcctacattaatttttctcatttaatcatcttaatgatctcatgagataactattttttttctacattttaaagcagaggaaagtatcagagaacttttgtcacttgctgaggtcatgcagctagtaagaacagagttagaattcaaaccagacctttcttcagaaacctaggcttttaatgatgtcagtatattgctcctctgtgtcagcgtttaaccctgcatggtgtagggaagaagcgggctattgcctaggatttgtgaaataaggatgttggtgagattattaaagtcagaaggaaacactgaaaagtggaatttgttgggaagaaggggaaccatttagggacagacactagacctttgtggtaactggtacggcggagcatggtgctgtggggtcactggttctcaaacttgagcatgcatttgggtcaccaggagggcttattaaaacccagattgctgggccacaccccagagtttctgatttactaggtttgggatggggtgaaaaattgcatttctggtaagttcccaggtgatccaacactttgagaacccatgtagagaaagtgtatgtgcttaggagtcaagtagacacagctttacattcctgccctactgtgggaggcttagagtcttcatcttaaaagttctgtaatatagggtagtatgtatattacaggatttttcatgagcactacatgtgatttagaaagtgacagcaatatttggcaattattgaatacttactaaacatcagttactttgagaagcatttaacatatgtaatttaatcttaagcagttaagtatgtcattcctacatgtaaaaatcttaatacgtatcagttgctcagttaatattcctgcacacctttatcagtaggccttcttaggcctggaaatgtgtaatatcccttagaaagattttcataaagttggcttatttctttaaaaaatgtcgacacttaaaaaggaaaacttaaaatacgtgtttttgtgaaatggttttactggtaacactagataagaaaagtgataatgtctgaaatgatagaattttcttctgattacttttgtggttaagtactgtgggttgtttgatactcatgtaactattcgttagaaatcagaaagcttaaccagctttacaaaaaagctggtttaccgttaaaattaattagatggattttcttctcctaaatttccatatgacaccttttcagacagtttctttcgtaagacttatttgccatttagttaaaattcttcacctattattaagtaaaaccaaaaagtaatcaattttattaccatactttatttggctctgtttgagaaatagtgtgttttactagaagagattaagagaggtagagacatggagattatgaaatgtgggatgtttctatttacttgggaatggatgggaacattttctttgtacctagtgtatgctacgtacttggtataccttgttaaaatactttagtacttactttatgtcgtggtaaggggattaaatggcaaccttaatttgtgtaagacatttaagacactcctggcacatagtaagcatttgatacaagagccattatttcatgcatttcagatatgggattataataatttccatcctcttagagtttacaatctaggagttcttacagggaatttgaggtagctcctaaaagaatcagcagttttaaatacacagctggtaacaagggaagctggtattctaagtcacgtgatttcaaagcctgtggtcttcctctggtactatagcccccaaagcaatgctgtccattctgtattggtaccttcccttcttaatcttgtagttgacagtgtcccacttcccaactttgaatgtctcttttccatggtctcagcatgttgtaccctgggttaggaatgatgtgtgaccagaggtgattcaacttgacctgctgggctccgtgacttaggcattgctggtgcagagatgacgattgtgcaaacctgatggactcatggaatcagagggcaccttgatctgcctgcagtgggtgaggcatagtatgtattagatcaggtaaaggaggcccttcatctgaggaaggggcccaggtttctacttagaaaagaaaggcattgtatttcatgctttactctctcgctctaatcatcagtgtgacagataaagggagcagcatggccgagtagtgagacaggtaggaagagtgagccttgaacatgtgttcatgaattctcaggggcttggtatacttgtagcaaagtgtttgaggagaggctctgtgagggagatgatgctggaggggtcagtgagggctaggtttgttgggggctttgtgtgctgtgtgttgaagggacatgctcaggcatagggctttatcaggagagtagcttgatcagattgtattttggagactctgtgcttcccagtgtgtggaggccagcttagaagcctggagtcccaacttaattgatgactttggagaaaaacaagagaactgaggataataaataaccaagaaagctaggtgaataactgtaagatataggtgagagcagaagtcagatcttcagattttaatgacagaatgtcaccttttcaatcagcaacaaagtagccgagtataatcttcaaccatctgctctctgggagaggagagaggagaggggaaggagcgaggaatgaggagccagagagattgattttagctaatcacttctaactctttcattaaatttttatggagaattaatacaggctgggcgcagtggctcgtgctggtaatcccagcactttgggaggctgaagtgggaggatagcttaagcccaggagttcaggaccagcctatgcgatgtggtgagaccctgtctttacaaaaaaaaaaaaaaaaaaaaaaaaaaaaaaaagaaaaaattagccaggcatggtggcgtgcatttatagtcccagctatttgggaggctgagacaggagggttgctcaagcctggaagatcgaagctgcagtgagccatggtcgcaccactgtactccagcctgggtgacagggcccaacaccctgtctccaaaaaaaaaaaaaaaaaaaaatccttacatgtctgcattttagccaaatatatggttttgttagcaaaagagagaatgtctctttaagtattgacctaattaataattctaccacttccagagagttgtgaaacatttttcagaggtagagacactctcgcttgctctttctcgctctctctctcttgctctctcgctcttgctctccctcgcaccctctccccctctccccctctctcccatctctctctctctccctctcttttgctctcactctctgtgtgtgtgtgcgcacatgtgtttgaaagccagcaccatctgaacaatttagctttgctggacaaaaatagacttgagagggagaattgtacattgaaacaagaagaacttacactcttacaatttttcaacactctcttccttttaaggaatacttctcattaaagggaccatacattaaattatatccaaacttgagtagttttaatttcttttctgtctgaaatccctgttagaacaatctctaaaactactccatagacacagaacttgagtagatttattgagcgccatctgctggctttgttttaatggaccaaataggtggtgcctggacatctttaagaattatcctgtatcttagtgttgcaaaattatgaagctggaagacagtatgaatttgggctatgactggtagtagtatttaaaataatagttttgtgttggcattgagaaaggggtatggttttggcaggagaatacacacaacctgattaaaaaagaagacaggttatagggatttcattggccagtatctttattgggcaaaagattagcctagtttaaataaaaagtaaccttaaatgccaaataaaattctttaatattttctaacagtgaagtcaacctaagtctttatctggaatgactttatgtaaaagtcgataaatttcttggtggatttctattcgtgttgcatgagatactttgaggtgtcttttaaagaaagatttataaaaatggctttgttggctagtttcaagaatgcgttttattttgagggatgtggatactatcttagtattttcctgctgagacagatataggaaaagcccctaggttaaataaataagggtgaagctgttaggtgctcttcttgtcattagtctttttgaattttagttatattttaagtgacttcttaagggcaactgagctaaaaatttggcatacccagaccattagactctagatcttttaattaatttctcatccagtcatcttaagtatttaagatgaattgtagaaagattgtcaggccgggcgtggtggctcatgcctataatcccaggactttgggagaccgaggaggtgggcggatcacttgaggtcaggagttcaagaccagtctggccaacatggtgaaactccgtctctactaatacagaaaaattagccgggcacctgtaatcccagccactgggaagactgaggcaggagaattgcttgaacccatgaagtggaggttgcagtgagctgagattgtgccactgcactccagcctgggcaacagagcgggactccatctcaaaaacaacaaaaaaagaaagattgtttacagaaagagagaccagaaaggaattcgtgcattcatttggccaacatttattgagcacctagaacaacgagacatacctttaggcaatgatgtagcattgaataaaacaaatatggtcccacctctcaggaagcttacgtaacagttgggaggaaaggggaactcagataaatacataaatacatgcttttagaattttatatatacatataggtataatatataatgtattaaatagacatacatgaataaatacgtgtcagaaagtaaatgatgctatggaaaaaataaagcagggcaagatagataaggagagttagggtaggagagctcatacttcattgaggatggtcagggatgacctcactgctaaggggacatatgaagaccaatggttattagtgttatataaaacagttgtttatgatcgtcttgcctgaccttcaccaaccatgtacagaaagcacatgggacagatgatgttattaatcgtttcatgggcccccttggtctagaatataaaggctgatccttggcactgctttatgcccatgttccctatgctgaagccatggtccgttagtccttgaatacaccgtgtttgttcagttctgtgccttcgtacatactctcccctccttggagtgactttatctcttgtcttcctagtcagctcttacatggcttttgaaattcataaattttactttctctgggtagcctttgtagtctcctctggcaaattttcttccttctctttctttatcttctgttaggccatagcacttttgaaatgtttctatttatagcacctgttatatcactgtaactgtatgttggcatgagtttcttctactaaatcagggggtcttaatctgttttttgttgatgtctttgggggtgtgtgaactgctggaaaactgtactaaaaggttatattagactagtggttggcaagctacagcctgtgaaccaaatctagcctgctgcctgtttttgtaaataaagttttgttgaaacacagtcactcccatttctttatgtattgtctatggctccttttgtgctaccaaaaaaaaaaaaaacataagaaacgagtagttgcagtagtaaccatatttcccacaaagccgaaaatatttaccatctgagtcttcacagataaagtttgccaatcctgatattagatgaaatggggattaaaaaggaaacatttggtgttgtatggcatgaagctgactgccttttccttgtgtctagaaaccacagcaaagacagaacaagtcacctaacttcaagtttctctttgccccaagacagagggcatgacattcttttagtcaaccaatttggatgtcaccaacacctgatgacaggtggtggtcgtgtggccaagaatgggagcttctggggactggtgtaatcagcttgcttcctttagaactgacatccccaaagcagcggcaagtgggagtaggatatgatggcagtagcacctaatcaccctcctccactcccacacatcagactggtggtgctccctgggcacaggtgggcacctgctggaaaagttttcagtgtgcttcttctgagacttgcccatgagggcgtggcaggaatgggggccatggatcctggcaaggatatattcctaaactgtccttgatggtgtaggtccctcctccttttctctgtggcattttgctttgtccatttgatgccatatctttacagatgggtttcagcaagatattctcaaagcatttcaagcaggaatgagccctgagtaatattgatggagcctctcttttcctcaggcactttgtgtaattttttttttttttttttgagatagggtctcactcttgtcacccaggctggagagcagtggcacagtcttggctcattgcagcctcgacttcctgggctccagcagtccttctacctcagcctcctgagtagctgggatacaggcatgcactaccgtgtctggctaatttttgtattttttgtagagatggggttttgctgtgttgcccaggctggtcttgaactcctgggttcaagcaatccacctgcctcggcctcccaaagtgctgggattacagacgtgcgctatcgtgcctggccttgtgtagatttttttaaaggtaaggggttgaagtggggaattccagccctctgacgggggtggtggtactgctggctctttagctgagtcctctatcgtgtttcatctggaccactcttgatagcttcctaagtggtctttctgtagtttccttgctctgtcctgttctccgcagaggaaccacagtaatcctttgaaacatgaatcatgtcactcttcttttcaaaaccctccaatggtttagcatcacactaaaaaagaaaaagaaaaagaaaaaaaaatccatattccaacctcgccttccatccagtgttcattcatttgctcctccagactgacctttgctattttttgaacacgctgagtttgtacttcccttgcactcgatatattccctttgccttgactgctttctttatcttcccttaacttgcttcattcaggtttcagctcaaatttgccttccttggaggagcttttccagaccaccctgtcaggaaaagtatcctctcatccctatttcagacaaactttaacccctttatgctgtcttactctttctaatagaactttccctctaatgttactttctataatttgtcttacctgctaaaatataagctccatgagggcaaagggccttgtctttcatgtttgaggcctagttcttaacagtgtctgacacatattacagtaagttttgtaatgaatgaattcattttgctgacaaaatgagtttcaagtggttcttatcaggggtctgtagctattaagtgactgattctgattctgtttcccagcctccatttttatatttcactaccatgtgtggcggctgataccttgttaccgagtagcatgttgcatttaagaaatagtgagtgctaaataatattaaagatttttgtgcatatgcttgctttgtaatggtattgatttcccagagaaacgaagctactcagagccattcatgctactttgaggtaatactaaaggaccaacagaacaggatagctctgttcagtgatttaggattttagatttttttcttctggtaggatttctgttttctagcttgatggcaataacatcatatatttacgttctcatcctaaggagccttggggtactgctttgctgtgaccgtgccttatgaatttgtctttcattttctagagcactccactaaattaggcagcacaaatgtaactcatttatcctataattaaattttgtgatattctccttttgaatgaattccgatgtaaggaaggccaagggatagcacttcagggtattcacaaagttagaaatacaaggtttgtgtttctttggggtttgctagtgttacatgacattttataagcgtcattatatccagtgtttagaaactctcaggtctgagagctgaatggttttggatttagtttgtagcctctgtcacctcctccgacatgtcacccctgtccactggttgcaaatatcatttctttcaaacataatttgaaatcaggtgagagagaatcggtattcctcaggctccttccaggtgacctgtgtttgagaagactgtgggaggcctccctgccctgcgttttgctcaggcagtcaagggcctcctctaatccctgcagtccctggtccttgcttctcttactatgcttttgatacagctgcaattgttaccttatgtgtctttttccctgaagaggctgtgtacaaagatgaatgagatgcagtctctggcccagcttcactgtaatggcataagctttcagagagtatgcgcctgctcgaggtgatctgtcttgagctttgagcagcactgggcttagacatttctccacagaagtctttttggtcatattcttcaaggtagagtttgggcattcatctccctgtacctagagaagtcagtatatgtattaatatagcatttgttatattactaataaatgtataattatattagtaatacattttattgctagtatacaattattgaagtaataataaaaggaaatgtttaaagtaacaaaatattttcagatattttaagactcatttacctgtcaacatgatttcatataatgtttgtattttaaaaaatgatcccagtaatggatggcagttctatatgtatatttgctagcagtaagtcatttgaaaatcctttaattaatgcaggctaggtttccacctgattatcacagatgaacaattatatcttgtcaagattgtatcatcctgaaaggctttcatagttaccaagggtgttattaacaataggtggttaaaataaagagaactctgaaatattttaaatggtgtggaattgagtgtatcatgaatctgggaagggatcattattttggtttagcaaatgagctttctgaaacatttgaaatgggaaacaagtattttaagttttggctgcagagtgctcacttgtgactgccattaatagagagagatatggcaaatcccatgtttttaggtggcgcttgagtttgggttcctcttgggtccatagggccatttctgggttcaaggcacaggaatagatagatgaaagatatgttatgaaaaaacccatttaaggctagagaaaaaaaaaatttctgagtttgttgcttttcttcagacgtctctcttccattgtttgttctgaggatttctttttaaaaagtcattccttttaatgctgcaagacttttatatccttgcctcttttggctttgctgatcctctcttctctgatttctcctcttctcggactggcccttccttgtttggcctgtttctctggatccatttcttcttactgccttcccttgctggaacaccagcgtctagtcattggctctctattaccacaaactcatctacagtcaaggttttagttcttaacttagtgcaggttgactttcagatctgactggccaggctagcccttttttgacagcttgccctgttacctacctgttggatatagaataagtacaaatatctatcctgtctaccctgctgatacatgaaacttaagattcaaagccccatcatcttatcacaaattattcccacaagccactagttttccttagagatacccctttttctcttaattctgcttgaggcttactatcttccagtcccatccagtcacttgtcatatttcatcaaattattattattgttaatttgagagacaaggtcttgccctgtcccaggctggagtgcagtggtgtgatcatagctcacttagtctgcatctcctggctcaagagatcctcccaccttggcctccccaggggctgggagtacaggcatgagccactgcgcctggcccaaattatttttaacagaatttttttctcacatttattatttttttagattggtagatcttgctaccatggcagttaagcacttttaactttctcacattgtgtttttgtattattttctccaaatggtttctttgtctctattctttttccttcttaggacgtgactgtgagagaaatctttctggaatatttgctgcctttaacaccccctcaccccccatttttctttcagtatataccacataagactgtctttttttttttcttcgtcgcctacacaggttcaagtatgaatcttttggcttgccattaatattcggcataagctcatctctgccatctttatttactcagttatggaacaacttcctaatgctagatgggccttgtgtgaagtttcaaaaagacagtttttgctttccataagcctcaggtggtgaagagaaacatgtacagcgcagtgcacataattgcacatctctctgactttgtcacacgtttggacccaagcaacacgtttgggtttgggtttaccgtgagtgtaagcagacctcttgcttctcctcccttctccacctccagactcttccatctttcttgttcttagcaccctctttctcctataccctgtagtccttcgatgcctgcgacttgcttgctatgtaacatgttccttctatcaacaatgatctctttacacgtatctcttttttccccacacctaactgtgtctcctcttaacttcaaggtcaggatatagaggaaagaatacagacttaggaatcctacttggatttgaattcccgcttgaccccttctagctttttaaaggcaagatttaaaaaatactctcggctacagctttctcatctctaaaatggagataaagataccttgcagtatttgcaaagcacctcagtcagcccctcacctgcagtaggcattcagaaaatgcagtagtatgtgctgactcatcttcctttctcacctttaccatgctcctacagtgttgactatttttatgtatgtatgtatgtatgtatgtatgtatgtatgtatgtatgtatgtatgtatgtttttgaggtggagtctcgctctgtagcccaggctggagtgcagtggtgtgatctcggctcactgcaagctctgcctcctgggttcacgccattctcctgcctcagcctcccgagtagctgggactacaggcacccaccaccatgcccggctaatttttttgtatttttagtagatgctcctgcctcagcctcccaaagtgctgggattacaggcgtgagccaccgttcccggcccagtgttgactatttttgtaattttagtttagtgataaaaacgtctgtggtgttgtattatttatttttcctaggtcctcgggtaaaaggcgcttgtgtgagcatggacaggctccatgctctcagagtgaggctgaaggaacttctacatttgctgttaatgatagagctttcttcacatctgtattgatagggcttcccacaaccccagcccttaatttattttaaagcctttttacagttttttgtgggaagccttggaggttttacaattttttatttttatgtttttaaaacttttaatgtggacataattccaaaatattaaaaatattaaaaaataattttataaagagttttccaaaagtagtacaaagaatactcatatattctttactcagggcaacacctgttgttaacatcttacgccatttgctgtatcattttcactctagcgatttacctgtaggccgacaatttttttccttaattatctgtcagtaagttacatgtatcctggctgtttatttcaaaaatgcttcagtatgtatttcctaaaatagggatattctcctttgtaatcacagcagggtagatactgctctttagttgtcatgtctcttagccttctttaatgtggaacacgtccacaccctttctttatcttctgtcttttccgattttgaagaatacagtgccctctcctcttgcttaatagactgtttctcattgtccgacgtttccttgtgattaggttgagggcttgcatgcttggtcagagcactgcataggtaaccttgtgtctttctcagtgtgtgactctggagacacatctgtcatctgtctttattgagatctttattttgattaacctgttcagtgtattggcagatttcgctgaatgaattctcctttttttttctttcttataactaataagcagtctttggggagacacttaaagactgtgtaatatgtatgctgttcctcatcagaatctccctctggattgagcattcattgataactttttgccagagtgaatctttaccatatgtttgcgcagtgataattttactattccagcaatctcccctctttaagcagtcagcccgtcattctgtgatactcataggaactcccttctctgctgtataatttatctactgttattaatatggactcatgacttcctatttgttaaaaaaattgtttataatttattgctgttcttgattgtgtagtctttaaattgtcccaggtttgtacagaggaagccacttgagtctggcttctgtgtccttaagacatggccccatcgtttttttgagcacttcattgttttctgtcaaaacaagatattacagtctcatcttatagatactctgacccaggcctggaatcagccaagtctctgaagggactcggttctttttattggagaatggtattagtgaccaatgcctgtacactagataatattcattgctactgagtgttcctctgttgtgtaagcctttaatgaaattgaacactggctgccatgagttgccaagttaaaatgccatgactttgccttttagcctatggaaaagttgtagctacctgtcagtgtttggttgttttagcagagtaactgggcaaagtgttatcaattgcctatcaattgtatgtttaaaggagagaacgaagatagttatgtgaatacaagcagtgttggttaatgagattttgaggggttttttttttttggtactgtaataattgccacctcatggaaaggtaataccctgtaataacactcagtttttatttagtttacttaactctcttgtttcacttttcccaaatttgcagtgggtataaatcctgtcattttgtcagactgggaaataaatttgggaaggcctgtgaaacttttaagattctggattgaaaggtagtttttgttataatttcacaattcttggagcctacaagaatgtctttacataaaatatgtgactgcaagatataaaaaataaactcaggaatctaaattttataccttttaacttcaaatatttgattataaattatttgagcagatatttcttggaaactattctgaaataatttcaagtttatagaaaagctgtaaggatagaacagatattacatcttataaactttatgcccctattttccaactgttgacattttgccatatttgcttaatcattctgtctcttatcatttctttcctgaaccattggagagtaaattgtaggtctcacgtccctttactccaaacgctttgttgtgtggtttctgagaacaaaggtgttctttcataaccacggcacaataccaaaaccaggaattttaacattggttccatgttaatctgtaaacctcattcagattttgcaagttgtcccgataatatccttaatagcagcttgtttttattaagtattcactccaaaatcatgtgttgtgtttagttggcaaatctttttagtcttctttactctggaacaggacctcaatctttgtcttttgttaatgacattttctgaagagttacagaccatttttttacatagatgccccttcaattcaagtttgtctgatgttttctcatgactagattgaagttatgcatttttgttaggaacactgtaagtgatgctgtgtccttagtgcatgctatgtgaaatgtgatgttagcttatttctctatggttatttttccttttttttttaaatcatttgattcaggtgttatctgccaaagttctgctttcccctttgttatttataagccttaagtgagcatttctccaacatctttgttgtgtttttaacaacttctttaacattttaaacatcttttctgttgtccaatttttaacaacaaagatgttaaaaatcagaaaactcagaaaagcacatggtgtattaaaattccacctaggaataactgccattaaagttttggtgtctccctttctgtctcttcagatgcaacttactagtctagacaaagcaggtttctcagtgaataaaacatgctctaatggggtgtacatcctggcacattataatagtagtcatttattgaatattatgtgccaggcacttgatataggtgctttccttttatcaatcacttaattcttcaaaacgaccttatgagataaggttgatgattcttgtcctccattatggcataaggaagttaaacaacataccccaagttaaacagatgtaaagtgatataccatactgtgataaagacacaggcaggttggtgtcagagatcatcttcttaatcacggtgatacactaacaagttataaactaacaagttaacttaaagtggtgataatactgaactgctgtgaggagaactatgatgacactgttacctataacctgtgatggtttgtacttgactagggttttgtcttatagcaagacctccattctttccgtaagtggtgatgtctcttaaatgggcctgccacggccttccttggtcctccctgtggaaattctccccttttcccctctccttcccttctgctgacctgttctcagtggtgtgctggttaaaaagaaaaaaagaaagccctcatttatatcatttgccaatttcagtggtgtaaatactcccataatggttgatttcaggtatccacaccacattacgaatacagatttgacaagagatgtgagttgtgaagacacgcagcaggacaccattatgtggaatttctgctgtctggatacaatagatacaaactttcagggcatggagaatagtatgttgtggtaaataattagaaagtgataagttttgagtatttatgacatttgtttttaatgcagtttacttagttataagcctatatcatgtaatttttaataatggctgagtttaacagctgtcttgcagaattcctgaaaatttaacaatgagcactcatgagcctacacaagccagctccagtataccactgtgatttctttgctgctgactgggcccacctttgaaaatctatggctgacacttccttactatctaagatgacatcagtgccatcctgtctttcactcttcctcctacagggctttctatctcattctcctaatccatatctactaccttccctgttcaaagcccatttctttccattcatccctgcactgtaatttgactcttcccatcccccaaatacgtttccctttcccatcacacttttttttttccccccatcaagttacttttcccagttaaaggaaagcctcagaccactagtatcttgggacatggagagtctcccagcaagatgttgggtcttatgaagtgaggaaatctttggtctagaaaaggaaaatacgttcttagaattccagggttgaaatctaggtgaaaagatttttttaaacttaatatataaaggaagttacagtgccattattatagtatgtagctactctaagaattacttcaggatggggaaaagtgagaccatggctaccatttaaaaccccattttaaagtaactgttttataaaaacctgtttttatttgcaaataagtgatttgataggtgatattttagaacacagtttatttatatgggggtggggggagctaacctatatttacagaataaggcctagtatagaggtcttttccattagtttttgtgtcatctgtcagcaaaactaattaggaccctgaaaaaattgtcagttgcagggatacatttctcactaatgaagaaacatggaaaatatctgtgtaaggggatcacgctgtttcttaagttcagattattggaagagggtggtgatgtaggtgtgtactcttcctgaggttgggtcaaactaaaatgataattgagaatgtcttgaatattgcccttgttaataagttgatctattttattttatttagaaacatggcagacttgttcactgtgtagccagactgatgtgtctatttattcttgtaggctggtctttcccaggcacagcagaataatttattaataccagggtattctttaaggatggtaggattaaagcatcatgacaaaaattgttacctagatctgtttttccttgttattttttcatcaccattctactcatttaatctttaaaagccatctcaagtaatagtaggtacctggttctactggagtaaaatgggagttagtggctgaaatgcagtttgttatttgctgtcagtgactttatcagtgtgcagagaatactccttcaaggaaaacaggtaattttaattccaggtgccttcggaatctaaatttcaagaggctttgaaatgaatggagcttctgtgttctcttctcttgaatattttgggcataaggtagtgtgacttaatattaaaaacaaacaaacaaacaaaacaacaaaaaaactacagaccaggtgcagtggctcatgcctgtaatctcaacatttttggcaggccaaggctggaggattgcttgagttcaggagtttgagaccatcctgggcaacatagggatacctgatctctacaaaaatttaaaaagccagaagtggtggcgcatgcctgttgtcccagctacttgggaggcagcagggggaggatcacttgagtcctggaactgcaggctgtggtgagccctgattgtgccactgcactccagcctgggaaactaagtgagaacctgtctcaaacaacaacaaaaacccaattaaaggtatgaaagcaatttaaaacttacttgtaaaaagaggttcatattgaaagcattgctaaaaggatttcatctgcctataattagccacctcctctgtccccaaaggaaggcccagacttcactagtatcttggggcacagagagtctcccagcaagatgttgggtctcatatgaggacaaaattcttgatctggaaaaggaagatatattcttagaataccaggttagaaatcaaagtgaattttttttttttcctgtaaaagtccagatagtaaataatttaggctgtgggctaagttctcacgtaatcattaccttttatggcccattgtagtgcaaaactagccatggatgatgggtaaatgaatgggttgggttcaattaaacctttatttattgacagtgaaatttgaatttcatgtaattttcacattaaaaggattaaaaggccttctttcttccctaaccctaacccccacacccgcccccacaaaatgtaaaacaggggatggtgggaggctggaattgacttgtgggtcatagtttgtcaacctagtcatagtttgtcaacctgtgctgcaaaggatggaactttttatttgtacttttttcaggctgtgaggatatttcagtaccttgagaaatggactcttctcatacacgctgcaaaaacatctttttaactggttgcatcatgccaaagaagattacacattttaccaggctaagcttttcaaaaatgtttccaagagagagtcttataaacaagacagaagtctaattctgagtagtaactgaagtcagtgataattctgttttaccagccgtgatattccttggattaggatactgttgaatgctccactgtggtagtcgtagtagtcatggacccactggagcattgtttgttaatagacctggttcctaggtttgacttgatgatttttgctttttagtgtttagtaaaaaactaccttctgctcagttatgctgctgggcttagtaaattgtgaccacagggtggtatgtttctcttgttggctttaattgttgctaaaatcgaaaggaaaaatattctgtacataatgagaatttactcccctaattatgatgctaaaatggcccagccttctctagattgatttttctatagtgcattattaagatttatatagtattaaatctcagtgctttaaaccttgatgctttgtaatcttttgttatggttacaacaggaattatatagttcgtaattgggagaatgctaataattaggactgtatttcatagaatatatttagccactggccttgatttaaaaaaaaaatcaatatataaaaactactaaagagtatttgcggctgggtacggtggcttactcctgtaatcctagcactttgggaggctgagacgggtggatcatctgaggtcaggattcgagaccaacctggccaacacggcgaaaccttgtctctactaaaaatacaaaaaaatttagctgggcgtggtggtgggtgcctgtaatcccagctactcaggaggctgagacatgaggatcgcttgaacctaggagttggaggttgcagtgagctgagatcacgccactgcactccagcctgggcaacaagagggaaactccgtctcaaaaaaaaaaaaaaaaaaaaaaaagcaactgaaagacaaagatgtcttaccttctagtagttgcaaagtcatagacaaagttattggctcaagatttttgtctgattttatgggattaatgtaggggtggataaagaagagtaggaatgtcagatggtcaggaaatacaaattattagaaaagcagcctcctattgaaataggttaaaaatattatagaccgagagttgaacatgttccaggagctttcctatacagtcatgtgttgtttaaactatggggatacgttctgagaaatgtggtattaggtgattttgtttgttgtgcaaacatcatagcatatacttaacacaaacttggatgttgtagcctgctgtgcacttaagctggagcccaagctcgtcttctttgcactctaccctttccaggcaagcctgttgctggagaatgtatggacttggtaatgatttatgggatatagaatttagagaattattgtcaactggaacacaggagttaaggagcattctgagtataaggatgtgatcatttattataccccctccatcctctctgccttatttttggattttcttctatgtctccccctgcccctcccctttttaacccattcatcaagtaaagttttccttcatcttgttgattaacttacttgtctaatgacctccactaaaatgtaagtttaaagaagagagagcgatcttattttcaggttcattctgtattgtgaatgcctagatgattgcctggtgtataagtgctcaatctttatacttgtttcagcttaccagaatgggggcatggtttagatgataaatttgattttcccttaaatatgatgtttgataaagataggctgcgaagaggaaccttactaatgtaaacttgctatattgtttcctttcctagggtgattgtgttgttacagtgctgcttgctgaagaggacaaagctgaagatgatgtagtgttttacttggtatttttgggttccaccctccgtcactgtacaagtactcggaaggtcagttctgatacattggagaccattgctcctggtaagtatttgaatgggatccttactagcttttcctagttcttaaacccttttattcgatgtttatgagtatagagtgacaggaagagtgaagtgtagacagtataaaaaaatttattagtttataaagcagtttgaatatctggtcctgctggtattggaacagattgccagttttttattgctgtgccattttatgtatattactgttatgtcggccacctaccaaattctgtaaattataacttatttaagaactgggattatgacagttgaaagctgtatttatcctcctacttggcaaaaatgatgttgaaaattcaaggatttaaagattctagagagtctctaggtatattattgccaaatttttatggacagggaataaaagaaggtagtcagcatagataccgatttcttttctgaagagtattagatatccttccttgtaacccacagctccagtcatcttgtttcctgtgatgtatatcatatcagaaaggcttttctggaacttgaggtctgctctctagcaggtaccatccagtatcaccattgctgaacatttattatgtgttggtgatggggagaaacagcttcttaacctaggtataatcgatcagtccgtgactcagttctcattaggaaaggaattgaggtaatttttataaacataatacttcctataataggaacactttagggttaaagttcgagggctgtgtgtttatatacctgtgtgtgcatatatatctagaaagggcatataagtagatacaaggagactgcaagcagatataagggaaaaggcaaatacaaaaagcatggcctgtgtcctaactgtgatcctcagtcacaaatcccaacaaagtctgttctattggtggagagggatgtacctggaagcccttatgcctttactggtaaggtccttaaattaggatgggcagcaggcaattactttctcagagtcactgaacttgtatgacagcctggagctctaagtttgtaccagatccttgtacattgtcctcagcctccctttctgagctctagttcacatttcttcccttgactttgattctagtaccactttatatatgtctatgtaagtacccttgccctgcctacccaagccaagcagaatgggtattagactctgctcctttcctctaatttggtccgaatcctcagaaatcattcctgacccctttgctttggccctgtagtcctacctagtacctggcttttcttctgttttctgctaatcatctctcctcttagccacatttcagtatttttccatcatgcttatgaggtcagataccagccaccccccccacccccacccacaccccctccccccgtcgcccccatcccattggcctgaatgttctgcttcccacctgaatttagtcaggcagctgatatgaggtgcctcatcacagcagaggtaacagaaggattagagtccttgaaagacctttttttacttctggaaggccaaatgcagagtaaggcaacactttaacgtgtgagcctttgatatgtgtgcaagggtaccagtgagatccttagttggtatagtagaaactctgttaactaagcaaaggagattcctgaccggaccctattgctctgcttatcacatatgagatttttctgattacttgtctttttcagctactgtcatttggcttagtttggtaatttattgtggaggggtagagatagaggcattttgggggttaacttgttttgcatttcttgtttataacatggggtaaattctttagcctggacctaaacttctttaaatctgcctttgtggacttagacttgtgtgttcccttccttcaggcccttactcagtatcacctcctcagtgaggcctttcggtccagctcataaaaatacacagctgcctcctctccacattccctatccccctttcctgctttatgtttctccattgcacttttcaacttctcacatatattttacttatttatcttatttattttctatctgccccaactaaagtgtcagctttatgaggacaaggatctttgtttggtttcttcactggtatctgctaagaaggctgttctaggaaactgtcacttgatagaacaacatttcacacatccagcttcccagaagctgctcttctagaaagatgtgtatgtatgtgaatacacccacactcgcactcacacgtaacccccctccccgcccccctttttttgttttttaataaattcaaaagagtctctggcttcttgagttgcatttttagcttggagaaggaatacgatgatttttgtgtaccagttagctgcattgatagcctcagatttcctgtttgctgagggcagtgttagattagtcaagaatctgcatggaaagtccagtcttcgtggaaagtccatgcagtgcactgtgcatcccagttcctggataaatgtgcatggtctgtttgttgcagcagctactgcctgcagggatgtctctgcactctttgtgcttacgtgtgggactagctctgcaatttctagtcattttggctaagagaagaaaaagagctttgtgtcttgttcttgtcccccaccccccaccccaagaaggagtcttgctctgttgcccaggctggaatgcaatggcacgatcttggctcactgcaacctccatctcctgggttcaagcagttctcctgcctcagcctcctgagcagctgggattacaggcgtaccaccacacttggctaaattttgtatttttagtagagatggggtttcaccatgttggccaggctggtcttgaactcctgacctcgtgatctgcccacctcggcctcccaaagtgctgggattacagacgtgagccaccgtgcccagcctcttcttgcttttattattatttttttatttttcatgtttcatccagattgctggctctgatttttctttgagttctctgtatgtttcactgtgtgttttgtaacattttagtttttcctaaaaccaaaggattgattaaccttcaaaaggcagcactttttgatgttagtctgtaaccttttatcaaatcaatatttccctaaatagagttgacacacagacattctaaattatctcctaataaattgttttgacttcggatattgaaattgcaggcccatctccccacccatctcagttttctctcttttttttgcgtgttttgtaataagtcctacaatgaagtgtgtgtgtgtctgtctgtctgtccctccctcctgccccctctttccccattcccctgtgtgtgtgtgtgtgtgtgtgtgtgtctgtgtgtaattacaaagaagttgtaaaggccttttaaagtagttatgatgtgatttcccctcctttttaaaaataaagtattttaagcgtaagtagtaacatcttagagggcaggtacgtggagactttgactttctattttatctatctttaaattttttttttttttttttgagatggagtctcgctctgtggtccaggctggagtgcagtggcgcgatctcggctcactgcaagctccgcctcttgggttcacgccatcctcctgcctcagcctccgagtagctgggactacaggtgcccaccaccacacctggctaatttttttgtatttttagtagagacagggtttcaccgtgttagccaggatggtctcgatctcctgacctcgtgatccacctgccttggcctcccaaagtgctgggattacagttgtgagccaccgtgcccagcctgaattgtttaaatgtttacagtgagcatgttatttttatgatacatagtaatttttgatgaaaacattctgaaggctgaaaagaatgtcctgtcttttgaaaataaatccatctttgtgctgattaacactggaggctaaccaaagcgttataataaaatattacatttaaaacacctatgaaagtggctagttcaagaatataatttgccttgaaacatagcttgagatggaagtatacttctagtaatgaaagatcttgccttagtaataaatgaaagtaaaatattccattattgtcccttcatagaaaacaaatacaaccctaaatgacattttaattaactagtgattttcctctaaagctgagatttgtttttttaagacctatgtaggattggcaaatagtgtacaaaatctggacatcctttgaagataattgttggggtgggatgggggcatagagtactgttttattgtgttcatttttattaatgaaactgtgaatttagaccaagcagtgatttcatagtggaagatggaacaggatgtttagtgggttttgtatactatttttgtaaaaggctttggtgcagaatctttcataaaatgaaatctattttcagcatgtctgttatttatttttagaattcacagcaagagttcttgtttgaagaactacaaacctttattgactccaaatttgactcagctctgttatattttccttttctttttcactgataagggagggtactttataaagtagatttgtcattaaaaaagaataatacatttacctgatcagaagttcttttgggtttaaagaaaaaaattgcagcccagattgcaacaaatggtctgagttataatatgttatgtctttctttttctttctctctttttttttgttttgttttgagacagagtctcactcttttgtccaggctgaagtgcagtggcacaatcacagatcattgcaggcttgacttcccaggctgaagttattcttatacctcagcctcccaagtagcactcaccatcgtaagtggcacgtgtgtgtgtccatcataagtggctggcacgtgtgtgtgtgtgtagatggtgtctccctgtgttgcccaagctggtctcaaacttctggtctaagtgatccttctgcctccacctagcaaagtgttgggattacaggcgtgacccaccatacctggcctctttcatttctcgtcaaccaagaattactttctagcagcaggtgtccagtattaccaaatggaatagcatatttgaaaagaagttgtagacttttaatttaatgggcttcattagagaattctgacaccccccatcccccagcctggccctgcccctggcaacgcctgtcaaggtaatcagttatttttattggactttttctaacagtctccctattctgaaatactctcaagctatctctagacagatgagattttatattctagaaaacttaaattactgtcctaatgctagttagtacatatagtggttatactggaaaaacagagtgagaactagttgaagaggaaaaaaatctgttgtctactgtccttagttgtaattttttttttttttttttgagagggtgtctcgctctgtcgcccaggctggagtgcagtggcgcgatctctgctcactgcaagctccgcctcctgggttcaggccattctcctgcctcagcctcccgagttcccgagtagctgggactacaggcgcccgccaccacgcccggctaagtttttgtgttttttagtagagacggggtttcaccgtgttagccaggatggtcttgatctcctgacctcgtgatccgcccgccttggcctcccacagtgctgggattacaagcgtgagccaccgcacccggccctgttgtaatgttaggaggaaattatatatttcataactttggaaccatgaacacagcactggaatcctagggcatacaatattaagggagtgatatcctcccaagggggtgaaaattgccttttgggaccaaaaaaaacttacagtgatatataaaacacagttacacaaatttgtggtatatctgtggtattaaagtttcatgaagtgaggagtgagtagagaataatgtctgaaaaggctctttgggatatgataatggaagaaaaggctgagaaacactgccttagaggtgtgggctggaatatagcggagcacatttttagcattaaatctctccttcctcctctaaaatgctcatggtgaaattcctgtgcctactctttgttctcttctgattaaatactcctgtacacatagagacattttacacatataccaaatttgcacactactattaggtccccaaaacccagcagtgggtgtatacttctgcacataatcctatttcctattagagtctgaatctgaagactgaaaatttgtttcctttaaccctatcatagacacttcataaggaagaaaaagacaccagatttttagagactttgatgcgaaactgaagtaataaagatattatttttatattttccatcattttttctcttagaaggtgacatctgtgtgggactgggcttggctggcccagcaaacacttttagggtttctttttggatagctgatgaaacaaagttcctattgtttcatcctcaaaagagagggcccagatgggatgcattccacttttagcttaataggaaatgaagtaattcttgggctgtgcttcagcagttttgtttatcagtagcaatatttcgtttccatgggtgcggtgctccatatagtgagaaggagcctgcaggagagctctcccaacctcgcacacacacacctcctgacctgccagcataaaaaaggtgcagattaggtgattttaagagggtcatcagtagttaagtttttgtttctcacctaggtgctccttgtgtttttgtttattctttccctcctcacttaatttttttagttctatagtgccaatggcaagctttgttgggccatgctggagaagctctttgtagagtattagggatctgttttccttgagtttcctaaacagaagcattttaatagctaataataaaaactaccagttttagttgcccattttatgccagatactttgtgcacagctctaatgtttttaacaatccgtaaggttgatggtgttctcattttgtgtacaaggaaaacaggcttcaaggttgaatgactttctcaggataaccaaatctgttgcagtggagctggagttcaaacctaatattttctacttgacagctaattgccagcatacttgatgaggatccctacagtttactcagctgggagcagacttctcccaccccataatttatatttgtcttgtaagtggacttgatagtgtgagaagttcagaaattaattcctaatttaaaatacggaattaaagtttgggctgtgtttcttccaatagtttctctctctccttcccctctctaaatcctctagagtagctgccttcataagttcagtaaaattttcagaacttccctttttaaaaaaagattgggatttttattttcctttcttgttaccaggaaatttaatcaaaggaaaaacaccatggaactaactgaaaatcctgctattgttcttcctactgcagcttctgtttttatgcagaaagttagattgtggttattatatcaaattggatacagtttctcatccccatgtctttgcagtgtaattgtagacattgttaataaccctgcagttggccaggcacggtgtaaggtgtaatcccagcattttgggaggcctaggcgggcggattacgaggtcaggaggtcgagaccatcctggctaatgcaatgaaaccccatctctacaagaatacaaaaaaattagcggggcatggtggcgggtgcctgtagtcccagctactcaggaggctgaggcagaagaatggtgtgaacccgggacgcagagcttgcagtgagccgagatcgtgccactgcactccagcctgggagacagagcgagactccgtctcaaaataaataaataaataaaataaccctgcagtctttatgtacaaaggtagtcatatgactaatgaccctgttgcaaatagtcatgtctctagcgctaatttatgatagtaagaggtttggtgtaggcatacgcggtgtaaaattattgagtctgtattatgtaactttttaaaaaatgctgatttaccccccaggtgctttatcagaaaggttataggaattaaaaaataatcttgagagccacttgaacctaatggaaaacattaatgtgagagagtaggcctgccaaactggtgtggttgatttccggacagtagggtgaggtactttattcttgatcagtagtaacgcttccaatgtactcttaagtttaataaagactaatccaggaaaccctgagttccccactcatcttttaaccctcaggttttcttttgaaaaagaagcctctaatcgtaccaaacaaattccagatttatggcatattttacttatgatgattcatagtttcttcttcagattttgaattcgtgtctgaagggaaaatattggattaacaattggacagtttctcaggtatctctttcatggctatttctgacattctgccttctcggttatacagtttgattttagttatacacagagctgacagtagctcacacatccatccattcacctgctaacaaactctgctaatgcagcagaaagagataagcatactgttgttgccaagcacaacccccgcgccccaacacacacccatcccgcgttgttctgtttctctccctgtcgttcgccctcatcccattctgcctgagtaaacagtcattttagcaattcgggacaaatttctgtgctgatacttactttggcacttcacagttttgggtaaggtagcattgcttcaccatggctctttgctgtgtgaatggtgtttacttttagtggtattgtgactccctttctgattcaagggttcaggtttctcatctttgcataggcctgaggaaggagatcaataagaaaggaaaaggactggttaaatggatagggctgtggatattctgttttacatagtgtaatctctcttctaaggcactgtaaatttaaggtttgaaggcataattcaatttggatctcagattacttgcatcatcatcatcattgaattgtgaaattttgacatttattgacatttattcatatctacctcaaaggactttcagaagtttacagattagcttaattttggataaatgggacaatgctatatattgattctgttgacgaaccacagcatttcttctttaaagcagttctcctgactgacatacgtatcactccatccatccatcgttcatcatccatccaccatcagtttatttggaaattaagtgaggctatatatggtgttttgggtgataataataaagaatttaggaggccccttctagattttatttatttatttagagacagggtctctgtctcccaggctagagtccagtggcatgatcttggctcatggcaacctctgcctcccaggttcaagtgattctcctgcctcagcctccctagtagctgggactacagatgcccggctaatttttatttttagtacagacagagtcttgccatgttcgccaggctggtctcgaactcctggcctcaagtgatctgcctgcctcggcctcccaaagtgctgggattacagcatgagtcatcgcgcctggcctaagtccttcttaattgccatctcctttgtgaaatcttcctgcttttgcccacatatggaatgcaccactcctctccccagattgcactgtatttagatatttaggtattttagataggaaagttcttgtagaactcctctcattttgacttcattgcagttatctgcaacttgattctctgttatgaaccgtaaatctctggggagttgagactccttactttactcatcttcaccttctgatcatagtgcctggacttgatggatgtctagcttttagctcttgaacaaaactgagtcagatgttagagaatattttaaaagaaacattttctgctagaaaaatagacaaatcttactaactgaatcatttggcttgtttctgctaacattgatgtctgtgtagttaggctggctgcccttcaaagaaatattgcttttttcccctaattctctttcatatattaaatgcataaataccgcatatacattattataaagtgtgcatgcatgtgcacgtgctcgcacttgcacacacacaccaggcagcggatgcttcagcttgctacagccttcttagaaagaattcgacttggaaggcagtgggagtatcgtgtggattcagtgttcatgtgaagacttatcttcatggttcatgaaccaattattcttgcttaaaagttaaactagcccatcattccaagtgttaggctcctcttaggcagggacttagctcttagccttcttcctcttcaaacacattgccctgtttataggcaatgtgatacaaaacccttgcatcctgatataatagaccatgtcctttggcatcagcctcgactctgaataatgaattctgcaccttaatatctgtgtaacatggggcaagttacttctttaagtctcagtttctcatctataaattgagaacaatacatgcctcataaaattgttgtggagagatgactgtcagatgcctggcgtgtgctaggtacttgcttggtaaatgtttcctaccaccctaaaattacacagcagtgagagatttctcttgccacaggatgagggcttaaggaggcccttgggaaaaaagcatgtggaaaattaacttacttattattctgattacatggaagaaacattgtctctttcaaagacagcagaaagcttagttcattccaagtctgaaacctctgttggcctgtgcccgtggtatggaaattcagtcgcagggaccatgtagagggtttccctccatgcccttagctgtagaagagcagtctgaatgtgttagagattcagggaagtggcacgtgcatgggtgcccatgattaatcaggcagagcacaaagtggcgttacccaaacaaaaacattaactctactttcttttctgtcatcagaaagataatgggagaaggatggtgataggagcatagttctggctatttgagatcagtgtgtgaaaacaggggaaatagtgttcattgtgatgagtatattctgaatattggaaatatttaattctgtgaggctaaaatttcaaaagaaagcccaattgtccaagaaggtcttacccatagacacgtggtgttaaatcttgctgacctgtctgcagccgaactctttggagtggcatgcagttttctgcctccaatcatcactcctgaggtgcctgccagtctgtacactgggcaccatggagtccttggcatgtttgcgtttcctgaactgggctcccagccacagcattgcattatcctcatgcaaaccaggtaatttcattgaagtcctcattacattagtggttgagatgggaaataatgtgtatctgagaacaaaaatcattacttattttttaggccttggattgctcatagtagtaaaataaaatcaagtaattatgtacttttccaagtgcttcatcatgtgagcctttgtatcgtgataataaagcaagtgctagtgaatctgtaaaattcttgctatataacttgtatgagtgatattttttcctgttatgttttcagatctaatttagttcagtagctattggactttccatcatatgctatgccttgaaggtccttcagctttcattcttaaatatgttcaaattgaatagcccttgttgacattcagagcctgttcggttccagataccatgttataggcatggtgaaagctgggatacaaagttttttgttttttgttaagggaattcatatttgcaaataatgttaaaagctgaaaatggagttttaagaagtttggaaaaatgctgtcagagctcaagaggaaggagggggtgttttttaggaggagaaatttgtatgtcgtgaaataagagctaagaggatccactagcgtcctttcagcagtgaggctctaatactgttttatttgctgcctgtgtttcctttaggtcatgattgttgtgaaacagtgaaggtgcagctctgtgcttccaaagagggccttcccgtgtttgtggtggctgaagaagactttcatttcgtccaggatgaagcgtatgatgcagctcaattcctagcaaccagtgctggaaatcagcaggctttgaactttacccgttttcttgaccagtcaggacccccatctggggatgtgaattcccttgataagaagttggtgctggcattcaggcacctgaagctgcccacggagtggaatgtattggggacagatcagagtttgcatggtgagaatttatatgatctacaaacacactttaagtttgtgatatttctactttttttttaatggggctacttttctatggtcatcatattcaggtcttccacagaggctgcgtaaatcttagaattactgtaggaaagtggcctcaatggcatctcttctaggttcttcaattgagctgttaagcatgttgttgcagcgaaatgaccctagggattacccaaggagagtggcacgtcaccttcctgtgggtctggatttcagatttgatctctcaagtgtagaaagtgacatgctcttcatgaggagagtagcagagttactttttggtgtttaatgatcaaagacatggttttcattattgtattctgaagttctctaaagatagcctggaagtgaaggagaggaaagattgggcagtgagtgggaggagcatgagaacagggtgtgctctgagaaaccacacacttccttaaccaggttagtgtcactcttactgactttatctgttggccctccctatgagagttcactgaagaaaggactttttgtttgttttttgtttttttttgagaacgggctttcactcttgtagtccaggctggagtgcagtggcatgatctcggctcactgcagcctccacctcctgggttcaggtgattctgctgcctcagcctcccaaatagctgggattacaggcatgtaccaccatgcctagcaaatttttttttttttttaattagagacagggtttcaccgtgttagtcaggctggtctcgaactcctgacctcaggtaatctacccacctcggcctcccaaagtgctgggattataggcatgagccactgcgcccggccagaactccactttttcaaaaatatttacatagtaagtcctcttactcaaacaagggttttcccacataattctagtagccaatgacatctacttgatgtcataattgtatagatattttttaatgaaacataatgtgtacctggagttcaataagtaacatccagtttcccttctgagttcaagtccaattgaacgatttgggagtcctgagatagaaaccaaaatgtttattactgatgaaatctagattggaagcctgatgttagagctcctgccagaagggtctgcttgtactttctatgtcttcaatgaaagagctggtcagtcacaccattgccctgtagagtccacccagccttgagtattgaattattttgggtaagcagaccacaagtcactctccccacaggtgagcagttcctgaggagaaatacccagaggggcctgagccatagcatagttagtttctacactcagatgaattttgtcttcttccatggaagaatggtaaagaggtctttgccagctttgattctcttaaatctacactaaatttaacagttaaacctgtggtcagccgtcagaacggtgtcccatactgtcaggtgcatactgtcagattctacctggatagtcctgcccaggtaaaacctgaaaggaagtatcaaatcaaggaagaaaggatttatccttttcttcttctttttttaagtatagtgtccaagaaacttctgtcttgctaatatttagagatcagaatatttgacattctgaaaaggcactcatgccttatataaacctggtgatgggccttaatacctctagctcctcctatttctgtattgatacaggaatgtttattctggctgcctttcacaaatcagtgtcaagatagtactgcattagttatttgtggggcttatggtgttttatggttttgttttgtcttgtttaaagaggggcccaggagttggatagttttatgttgccatgattaaaaacaactattagaaaaagcaaacatctgaaactttggacatatcacttcctctttctctctcttttttttttttttttttgagatagagtcttgctctgtcgcccaggctggagtgcaatggtgcaatctcggctcactgcaacctccatctcctgggttgaagcgattctcctgccttagcctcccaagtagctgggaatacaggcacatgccaccacaccctgctgcttttttgtgtgttttagtagagacggggtttcaccatgttgcccaggctggtcttgaactcctgagctcaggcaatccacccgcctcagcctcccaaagtgctaggattacaggcgtgagccactgtgcccggccacttcctctctttgggccttaacttccttgtctttaataggagggaattggccagctttaatttttttttgtactgtcagtgtactggtaaattttctgttgcacaaaattgctcaagcagtgctaacaaaggccaaaccaaatttgaacacttgaggaaggaaatacatattaaaaccacaatgagatatcattacacatttatcataatggctaagatgaagaataccaagtgctggcaaagatgaagaacatatcatatgttgcttgtaggaatgcaaaatgtataaccactctagaaatatttggcagtttcttgtaaagttaaacatacacttagcgtatgacccagtaatcccacttttgggtgtttatcctagagaaatgaaaatctgtagtcaccaaaaagtctgtgcacggacgtgctcatagtaatgttattcataatcttcaaaaactggaaataacccagatttccctcactgagtgaatacagaagcaaactataatatatccatacagtggaatactactcagcaataaaaagaagcaaactgttgacatgtgcaacaacttggatgtgttttaaatgcattatgcgggaaaatgaagtcagtttccaaaggttccatactatgtgattctatttatatgatattctggaagatgcaaaattatagaaaaagagaacagatgagtagttgctaggggctgggagtgggggaagtctgactggaaagaggtatcatgagggaattctttgggttgttggagttgttttgtcttgttcgtggtggtggctgtaagaatctatgcatgtgttaaaactcataggagtgtacatcccctaaaggtgaattttattgtacatatatttaaaataataaaataacaaaagaaattgtgtaagttgtatactttgcaaggtgaaatgcatgcaagtgacttgatagaagtgtctttaagtcaacaactgggatgaggaatctgattttctgtgctcagttcacattctgcagtttaaattgttctattaattgatgattagaatctgggaacactgggtacagtaagggagagaagcatcagttaagagttcatcacgcctgctgttgagggacaaatgtaatggaatagtctgttcacatcaatgagttgcacataaatacttttaaataggtatttaaaggagaaaggtacaaagtaaccatgatgcctgaggtaatacaggtaaataaggcaccttgttacataacaggacttcttgctgttgaaagctaggatgtttagagatattctagcctaatacttagacaaagtagtttatgtaagatttatggctaatcctcctactgttttaattgtttagttgcagtgctttttagctttcttcaggtcagtgactcctttggaaattgctcagatttctcctcagaaaaaaatgtttataggtgcctatgtgcacacatttacatatgataaatttcttaagtctccctgaacttcaggcatgagcataaagttaagaattctgggtttaactttgctcttacaaagtgggaaaagcaggggcattggagtcagtttgtttgcatcctggcttcattgcaagagtttgtgcaaaatactcaatctctctgttacttaatttcctcatctgtgaaatgggggaaagtgtattctgataatgtgtgctagtttataagctattcattttgaatgtaccatttggagacacaaaacattgatgttttacttgttacaaaaattaatcttcactttaaatatgaacaggagggagtttgtccttttaaatcttccaaatgttctctcatccctaattatataaacaagcttctacacattgtactgtttgccacagttctgccttaaatgcaggtgataaggattcatctgggtgtggcgtgaatggtggggtaaggacatttttttctctgagttttccaagtctcacttagtttctcagctcggtggttagtgaaaatggtaagctaggggggtgttttccctgagagacccttgtgcagtagccgtcagcataactcccaggtaatgtagggtgggcccactgcagacttgctctagaggaagcagggagaaacatcctgggggaatcttcattcttatttactcatgatattgtataaccaagtgaaaaagagatctgatcatctttgggggcaagaattctcccctcaaagagaaatttgggtggagaggtggaagacaggtttaggaaaaactgcagtaagaacagcctgtgtattcccaattctatacatctgatattggttaataggtcgcccaccataatcatttgatgattcagttcccacctcctttcagagtgtttgatagcttttctttctttttttttttttttttgagacggagtctcgctctgtcgcccaggctggagtgcagtggtgtgatctcagctcactgcaagctccgcctcccaggttcatgccattctcctgcctcagcctcccgagtagccgggactacagacgcccgccaccacgcccagctaattttttatatttttagtagagacggggtttcactgtgttagccaggatggtctcgatctcctgacctcgtgatcctcccgcctcggcctcccaaagtgctgggattacaggcttgagccaccgcgcccggccttgatagcttttcataaatattttttcgtagctacattagtgtttgtgtattttttttttttgagggagtcttgctctgtcccccaggctagagtgcagtggtgcgatctcagctcactgcaagctctgcctcccaggttcacaccattctcctgcctcagcctcttgagtagctgggactacaggtgcccgccaccacgccaggctaattttttgtattttttggtagagacggggtttcaccatgttagccaggatggtctcgatctcctgatctcatgatcctcccgcctcggcctcccaaagtgctgggttacaggcatgagccactgtgcctggcctgtgtttgtgtattttttcagctgtcatcactgctgaaaagaaaataacaacatattttaaaactgctagtggtttttttttccccttggcagaagattaatatttattgatcccaagactagtagtggtaggacttgagctccaaaaggttttgttgcctctgaaaccttgtttttgttacaaggttacaggtctcatttttccacaactgcattttctcacagtggcctgttctccttcctttcacatgcagctgagaattcctgcatcatgtgggactttaggttttttaagaggtagtccagaatagtacaaagaatggtgattttggaatcataggtatagattcaaagagtactgtaagctgggcttgctggggggattgatggggtaggagagtagtccttgattattgtactgatctcagaacttagaacattttacttagagaatctgaccatttataaaagatacaaccctctagcaggctcatcatgcttgaatgcctactaggcacatcaacttttttgcagatctgagggaaggtgtgtgacaggtgtgtccagcatataagtaaatagaaagcaggatgtgagacattttctgccttccttctctgtgggtagaggctaagcctacagagatctttccaattaagtatggttaaacaggataaccagccaacatggggtctatggaataacattacagcataaagaaaagggaaaagtatcataagtattcagatggaagattttctgagtatgctttctgtaagaaacaaaaaaatgtagatgatatttcccatttgccctttaaagagctcaataaaatcaggtttattatgaaattagagaaggagacagcaaggagaaaagtaggttttatgagtcagtgttcaagtagagaagcagaaccactaagagaaataatatgttgagatttattacaaggaatggcgcctttgattgtgagggctaataagtccaaaatttgtagggcaggagggggagggaagatcatgggcaaaagtcagtccaccaacatgggccaaaatatcacgtgaggaagggaagatcgtgggcaggatggagctccacaggcacaggctagtgctgtcctccacaggtggaatggaatcccttctctccaggggaaatctaagacctgctttcagagccttccagttgatgcagtgggattatcctgcccacataatccaggataacctcccttattagatcaactggttaggggctttaattacatctgcggcaaagctattattatgacgacaaggatggaaggggagtgagttggcaaaaatgatgcagccatccacaatcctaaagcacagttaattcacactggggacaaaggactcagttgacactgtaggaaaggccattagtgatctaaaaaaatgaagttgagtaactcagattacagaggagtactgatgcagagaaaagggaacagagattgatcctaaatgattgagctctgcagtttaaacacaaaaggaagaaagcagtgatggaagctttcatgctcttaaaacaacacagactaaaggaaactaaattcatatattcgtttatccctttgcaccttggcctcttctacaaacctaattcacatgacccctgaatcaaataaaaatgtgtgagaaattaatgggagaatacctaaaactgggggtatatgcatgcggtggactactcagcagtaaaagagaatgtactactgctacatgcagcaatgtagatgaatctcaaacatgctcatcgaagaagccttacacaagagtgtatattctataatttcatctatatggagttgtagaacaggcaaaactaatgtaggtgaaaaattcagaacaatggttaactctgaatgaggaggagaggattaactggaaagtggcacaaaagaacttttttggatattggtaattttctatatgttggtacagatttgggttcacgtgtatatgcatttgtcaaaatttatcaaatgggtatactataccatatgtatttcattgtatataaatcacctaaaattgtaactacatattgaatgctagttaattatatgcatgctgaagtattttggggtgaagtggactgatatcttcaagttattttgaaatgcataaaaataaggtggatcgatggggaaatagaaggaagaatcgttggatatatatgtgataaggcaaatatagaaaaacattaattgtaggatctaggttgttgagtgagtgtctggctatttgctgtgtgattctttgaactatgtgtatgttggaaaagttaataaaatgttggaagaaaacataaaaaggtgctttttaaaccacattagtttagcttgcttgtatgattgcttgtttttgtatttgtggttttatttcctagcaaaaagaaacagggtggagtaatggaaaaggttttttgtttgtttgtttgtttaatgcaagacagaagaacttttgattttaaatcctgatctgactgtgggcaagctattaattctatgaatctgccttcatttgcacaatgaagataaccagacctcatagggttactgagaagatagaatggaaaaagttgacataaactgcctagcccagtgcatggtgcatagcactacattgttttctcctaatctgttatcctcagaaagggtctacacaaaagcagatgtggtaccagttgctaagactttcagaaattgagagaggatgtagtgcagaagtcagggcatcagcttctgagcaggcgtgtggctgtagtattgggatttctactgaaatgctgagctgactcagaacaaataacaaatcagaagagtggttgtgggagggtggtaaagagacagctgcttcaaggttggaaataactagcctctaaagaatcaggtatttcctagttagtgcctcattagctctttgttcttgataaggatgtcagaacaactgtaaggcaaaagttagatggtgctatttgatcttttgtgaggattctatttgtccttttgtctggccttgccatctgcgcagaggtgttgattattaaaatttgtacctgcacatgtagttgttgcttctggggcataatctttccagccatgtgcctctggttaaacaccctttaaatcctgaattggtctatgcatatacagttctgtagggaaaatatacaatatgaaaaattgtgcttccaaggaaatttaccttggaaatagggataccagactaatacacagatgacatttggaaacagtgtaattcagtgtaaaatcacagcttcaaaaatctgttcattcctttgtgatattcacgtatagaagcatttgaggacttcacagtaaggagaaaaccactggggtccaaaaagtccgagtgcttagtgaagaagtttagacccgtgggaggccatgaagaaagagatgatagctaagctgaggcaggcacaacttcagggtgccattcccagctccctggagttaagtgtagtacagccttgtggggctatatgtggcatccctgcaaagacctcagctcctgtcatcctaggttgggcactgaggactgctgaaggaagagagtattgctagtgaaccttgaatgtaatttgatgtccaagaggacagtgaagagagccgggaaacagagaggaactgggatttaatgaatgtctactacagccagtcataatactagcatttcatctacctcttctcatttgttacacctctgtgagtgaggtgttggtatctcactttagggatgaagaaagtgaagttcagagatgttacatgaatcacgcttggtcacacagatggtaaatgccagattcgaaccctgatttgtctaactacaagcccttcctcattctgtcactttcagagtgactcactttactaagagggagcctttatttcaagttaaataaacgttttcctttctgcagttattagtggattgtcttagagttagtcttccttattgtgccaggagatgcatttcttcctctcattaaacaaataaataaagctggcagtgccagaaatttgatttgcccttattgtgtaggaataaaaagacccatgtgtactgaacaagcagaacctgtttttagtgtttaactagccaactcctgtctgggtgttcttttaaaaagtaattataccatttatgatacacccatttaagtcccaacagctattccctcttggacctcatgttgtggggctgcatttgcttctgttattattatttgagtaaaagaacgtgtgtatgggtcgcctttatatgcctgcctgtgaaattggttgaacaaacactgtgtattaagtcagaatatagaaatgtcctgattctcttttgcaggactgtgttcgattgaagattttgcttcctatactttctatgcttttgtagctttgttttgcctttacttgagggctgattctacctggccacaataaagctgttcacactgtatgttgtagcttaactttacaatcttaggcacttggaggcagtggtgtttacataacttgtctttatgtttgtttgttttttgtttttatattttcctcacttacgttcattttctcccccatttacagatgctggcccgcgagagacattgatgcattttgctgtgcggctgggactgctgaggttgacgtggttcctgttgcagaagccaggtggccgcggagctctcagtatccacaaccaggaaggggcgacgcctgtgagcttggccttggagcgaggctatcacaagctgcaccagcttctaaccgagtaagtgctccttctgccttatttccctcctctcatccccagccccacccccgattcataggagtaccacccacttggcatctcattgtgtgtttgccgcaaattaaaacctcagctctgtatcttgccttctgctggaggtttgtaagcttgctcctgctaaccacttcattgtctgagagagaaacgtaagtcgtgttaaccattttctctctcgtctgcctgcctgccttcttcaattcttatctcttatattttactattttactcaaaagtcagaatgagccttgtctgtggaggtagcataacattaccaatgtatacagtttatcctggtttagtacaagaggaaacagatttcctatatcatatatttttttctggtatgtctttaagacttgaaagagttaattagaaaccagtacttccatattataattgcatacagaaaatattgtaaacaattaagttttggattgaatgtaatttctgtgaataaaatttgagagcagtggtttcttcatatgaacagcaataaaaagcaactgaattgtcctggaaatgtgcagtaggaaatcctgtctgtttttgggctcaattattatatgtcctgactctttaaagagttctctagaggaaggttgttagtcaaaacatttgaagagcgctcttttattcttgtataaataaagaaataaacacactagagcagccaaaagtttttattggaatgtttatataaagaagtttcaagaatagtttctgttgtttaatacatttttattagttttgtggttatcatcattatcttttccaccacattatctgaacaagtataaacccattggatctatgttctttagcaattgagggacctgtgcaaattgagtcagtattagcaaattctcagatattttgctcatgccagatttaatttagttgtgctttatgttttaccatttttaactgtgtatatagtctggaaggaccaaaaagagacctcagaatgtagtgctacttacggttatgtaaacagctttttcttgattcacttgccaggcttatacctttccccatcacgctagacagacagttctttgcagaaagctttctgatgggtgctacagatacagtggtggtaggaggggcacttatctcaaatgagctttggatacctgagctctcctaagacagtattccagggagtgatacattctactccttcacacttcccatctggccaatgattggattcattctacggttagcctcatggcctcaggaagagaggccttgtttcagaagttgaaacagttaactctgcataactattgtgaagttcaaatgcatttcctctaaatttgatttttgctgggaagcagagttggttaaggactgccatccaaatggggaaataaagtgattacaacagcttcattatatccttggaggggatgtcacaagactgttattgcagcacagctttaaggaaactagagtgtgtttgttctttgacttttttttgcttactttaaaagtactacttctgttacatgtgggaaagccacttacctccttttgaagggagattggtaagggaaaaccaacctgagaaatcaccaatagaggaccctgataggagaggatgagcaccttgctgcagatctagctcttaacttgaattctgggatgttactgttgtgaagcttagaaaaagttctgagtcataattagcgattaaaaaatggaaagggggcgattgtcccaaatcactcagtgtgagagtgattctagtagaatttggtagaatttcagttgttaaagaatcaagaatgatcattttgttattggttttcttttctcctttccttcccctttcttttcctatatacataacgtaaaaatggttaaaatagtaaattttagggacagcattcagtagcattcagtaccatcacaacactcacagagttacgtaaccatcaccactattatttccagaactttgtcatcacccaaactgaacttccttttctccagcccctgataacctctgttctcctttctgtctctaagaatttgcccattctaggtacctcatataagtgaaatcatgcaacatttgtctttctgtgtctgtcttttacatagctaatgtcctcaaggttcacccatgttgtaacgtgtcagaaaaacaatacgtacttcaaaattgctaaaaaagaatgtatttctcaccacaaaaaaataagtagctgagatgatggatatgttacttaggttgattttatctttctatggtatatacatagattaaaacatcacactgtaccccataaataaatttatataattgttgttaccaaacacacacacacacacacacacacacacacacacacacagccaaaagtgtaaacaacctagatgtccatcacagataaatggacaatgtggtatattcatataacggaatactacagccttaaaaagaaaagatcatctttaacagatgaaactgagatccagagagacaaagtggttggatgaagataacaaggtggtatgaccagaaatagaagccaaaagctgtccagagctctttccttccactcctgggattcttaaaaagtggcccaagaatagacttcatggggtctgtatctcttgaaattataaaggtttatgcacatgtttttctgaataaagcatttgttggtgagattcacgaaggggtttgtagaaagttaagaatcgccacaatgtatgatgctatctttcttttttttttttttttcttttctttgagatggagtcttgctctgtagcccaggctggagtgcagtggcacgatcttgtctcactgcagcctctgcctcccaggctcaagcaattcttctgcctcagcctcctgagtagctgggattacaggcatgcgccaccatgtccggctaatttttgtatttttagtagagacggggtttcaccatgttggtcaggctggtctcgaacttctgacctcgtgatccacccacctcggcctcccaaagtgctgggattacaggcgtgagccaccgcgcccagccatgatgctatctttctaatagtttgggtatcttcttccccaccctgctttttaaaaatgaaattgtccacatataagccggcctcttttattgcctcttttcagttagtatgaaattgaagtatggctatgtatattttacatttattgaataactagttgcattctacactttactgaaaagtcaagcttatttaaccccatttatagcccttcccaagtacatttgttgttttaattccttggtgctttaccttgttttttgctttttaatttttaagtggggtgtggggagccttgtgctggttagggcccaagttctttttgtgtttctttgttcaaggcttattttgattgccagtctattttgataaagcaagtcttacttctgcgaaaattatgattagccattcttggacatataaggattctctaagacctatccctttagaaaacacttgaactttattttaaatcctaccagatagtaataactactcaggacattttttttacagtttcccttttttgtaacccatgattgttaactttcactttgttcagtgttagggaaggcagagcttttgttgacttgctgtttcactttagcttatatttagatcttacattatgaatatgaatgcatttgtgatctgaaaattcatcttaaatacattgtatttaagtttcactctaagtaaatgaaagaattcatgtagggagcataactcagtgattgacatatatgttatctcttatttccctttctttaattttctgtcttgcctgagaaatcttagccccagaagagtacccaaaacatgtaggcctacttttcctttagttggacaatcatctcctctgatttgaagaccccacccatggtcacctaactagttagtaatggagagaataggtaaagaccccagtttgcaggctcttggtgtcatgaatgctaggaagtgacaatatcagatgagcgtggcattgtagttatctaagaagaaaatattagagccagatgttattggatctggctgatctcttactcacacatctcaaagtagaaatcttgggacttggatcacccatgttgggggtatgagggagcttgagagtaagaggaggctccagctagtgactaggtgtgcaaacttggaagtcaaacctaggtttgcattttggctctgccatttgcaaactttccttgctaagccttgatttcttcatctcataaataaaggatattgctatttacttcctggatgataacccagcctttagtgtatgcaatatgaaaaattagggcttatttgtcatacagattctggttatttttgtggagcaaataaaggtgcataaatatttcttcttggagaaagatggtagtatagtatggtagaactgcttacggattaaaagcttaataaaaatctaagcttgcctacttagtagttagtgtgacttggaaaatgtcacctatccactgagtctcatgtttcccctctcttaatgataatacctgttctgcctacatcacaaggttattttaactaaaaaaagattggtgcaaatactttgttaaactctaagatactctatttgaacatttcttatatattaataataataatgacatcagtaaaattagagttaactgatcaatgaaactcaaattccagttgatcggtctaccagatatcttgttttgtaatatttcttgtagttctctgtgaattaaagttagtagagagattggagaattgtagttagactggctggttttgaatccagggtctacttctgtgaaactgtattatttatcttgggtgattcacttaacctctccaaacctcagtgccttttttttttttttttttggtctcacaagaagaagaagaggactgtcttcaatgggttgctttgagaaataaacaattcatgtagagagcataactcagtgattgacataaatgttacccccatttccctttctttaattttcttttccttctaatgcctatgtcagtttttcatacttcagggaaattttaccagaatcttgaagtattttaagcatcatttgaatgtccctacttgatgtaggacttgatgtagggacttgatgtaggttggaaattattccctagtgtaatagatactactttaaataaaattagtttggccctttgatacatgctgtgatgttgatgcctgtagattaatggaacaaggaattctagatggataaaaaatcatttacagtccttccacccttataagaagagtatttattttaagaatttcaactctggagtggtggcatacaagtgctgaaatatttcagttgccataagagccagtttaaacatatttgtcctcataaatgtcatcttatttttagtatcagctgaacaaatcttcatttattgaatgcctatactgcactagaaaccatggttggtacattacagatattgtttcatttcaaccttatatcaacctcgtgaaataggcattatctgtgttttgcgggagaaatatggaggctcagataattaaagtaactagtccaaggctatatagaaaattgtagagctactgttacacagacagctgtggaatgccaaggcccatattcttccctctacaaaaatttggcagagagaaagaagagactcaggacgaggctactagggtacagtattaaatgactcttaaatgtaaagggttatatggtttctagtctatatgttttttgaggaaaacaaggttcttactataataactgtacatttatattacccattatatgacttttaaagtatggttgattacatttaagctaccattttacatatggtaagtattgtcatctctgattgattgattgattgagacagactattgctgtcacccaggctggagtgcagtggcatgattccggctcactgcagcctccacctcccaggttcaagtgattctcctgccttagcctcccgagtatctgggattacaggtgcacgccaccacgcccggcttatttttgaatttttagtagagacggggtttcaccgtgtcggtcaggctggtctcgatttcgtgacctcgtgatccgcctgccttggcctcccaaagtgctgggattacagacgtgagccactgcacctggccatctctgttttataattgaggaaactgaggccagagaggtaaagtgacttgcccaaggtctcggttcacaaggttgcaaagtaacagaacctaaagtgcaccgatctgtccagattgaggggacacatgtgaatgttgaacacagacccagcctgacaagctctaggtactcagtcatgatttactgtagtgggcactattggcccctctcaaagggtttgtgcctgtaagctctcaagtccttcttacaagacacttgcgcttgaaacctaggtgtagggttaggtggtggagtgactactcaagaatacatatttcacaatggaaccaagtgctattgagcaagatgttctgccaacatagtaattttgcccttttagattcctcttcaggtacttgacaagtgggtcctcagtagcccatctggtgcaaaacaagtttggagactttgcttttgcatagtaaagcaaaagatgaaacaaatgtacagacataccttaaaaataataaccagagaggcaggatttgggataacttgacatctggccaaattcccattcatcagtctgtccatccctttgtatctgacttcctttgtcattgtgtgatctaggtctttgtgtcttggtaaagataaggttgtagaactgagtggaaactagagaatgggggaggagactaacatttattgaatattgaatacctgctttgtattatgcacagtactaccttggtgctttacttgcgttttcatttaaaacccctcagcaaacctcggggaggctaaagcagcttgtccaaggccgtatagttagtcgctcttttcacaacctgtctttaggttgtatttggatttattcatagaattttgtgaggaggcatgtttggtagcattttcaggcttttaacctaattaatttatgatggttaataactctggttctcagtgcctttttttccccctaagttttcagctggacaactttaagcattttgacattttgtattttttaaaccatttaactagtaatctcaggattgcctatctggcaacatgctagaaaattgcaaaatgtactttctgaagataatattgtacttatagagcaatttattgtattcgttgctaggtattttgtgtaaattctcatatctttatcctctccccagccctttgaaggtgggcgttttatctccattgcacaaggaaatgtaatagccatagctggtaagtgatggaggaataatttgaaccaggttgtaactccaagtcctgtgaacttttacaaactcccttgggctttctaagaagatgggtaggaatttaaagttggttggaatcacagagccattccaagcatcttgtgtttctataaacttcttttctctccctgcagaatgacacatatgtactgagcaaggtatgtgtttgttcttggttgccgtataacatttagacttcagagtggtcagagttgtgaaattacactacttgatctgtggtaacaaattatctatggcaacagcatgtgatttgtttctgacttcacttcaggcttaagtggaagaaaatacagacctggagtatagggcttgatagtcaggtgtgagaaaatgaaggatcagttgatagcaccttctgctcttaaaagctacatgtgatttttacttggtcaattctaaagttttcttaaacgcataccaatagaaagaatgacttgaacattttacctgcatttattattggcagaaatagaagtgattggggaaacaaggaaagtgattagagaaacaagaaaaaaactaggtgtgttgaataaacattttcactaaaaccattatttggctggagcagaatatcaccagcatagaatgaagttacgcgatacaagaataaatatgaggtagtaaaaaaatacaaccaatcctatgcatttattaatatctgcctgttctgttttgaaagtttaaccttatagtaggagaacagtttctcagcattaccaacttctagattgttcttgattcattaaacagcatatacaacttgtcctggcacatcagtaagacctctatctagttgaactacagacagttataattcagggaagtttttcagtaacatgttctagaaggaattttgtgttaggattctggatttaatgaatcacaaaaatcttttagctgctgaaattggttatcattgtataataatcattttgacaaggttttgtttaaatctttaatgtccatagacataaataaggcgcagtattcttaagtattcttcttaaagcctattttgttttattaatgaaaacaaaatgtatttgaggtacctgatatttttcctaacacttttaaaaatacatttatatcaggattgaggataatttatcatcgtttttttggcctttttttttttttttttgagacggagtctcgttctgtcacccaggctgaagtgcagtggtgcgatctcagctcactgcaacctccgcctcccgggttcaagtgattcttttgcctcagcctcctgagtggctggaactacaggcgtgtgccaccatgcccggctaatttttttgtatgttttttcaccgtgttagccaggatggatttatcatagtttttatacatgattttggccattttttcttacaaaatttggagatggcaatgttgacattctgctcttaattttattcttatgtgaatgattttcaaattgaacttaccctagaaagacacatggcctaaatggaatatctacaatttaaaaaattgttttatttaatgtttagtgttctgaacactagttaataaaaagttaaatctagagttttaatataatctaacatctgtaattcttttttttttttttttttggagacggagtttcgctctttttgcccaatttggagtgcaatggcgcgatctcagctcactgcaacctccacctcccagatgcaaacaattctcctgccttggcctcctgagtagctgggattacgggcactcgccaccatgcccagccaattttttgtagttttagtagaaacagggtttcaccatattaaccaggctggtcttgaactcctgacctcaggtgatccgcctgcctcggcctcccaaagtgctgggattacaggcatgagccaccgtgcctggcctaacatctgtaattcttataccatttaaattttaataaatatttgttggcttaataaagataaaatgttcttcctaaggttatctagccggtgcactatctcttaatattcattttaactgtcaaactatttatccatttgaaaactctttagttgtttttgcatatgacattaacagtttctatagtcactgattattgtaccattttattcttatagtacatattttatgctttaactggccaatagaatttctgcataaaaagcacataaggagatttgtactttaaatcaggggtccccaccgcctaggctacagactggtactggtccatggactgttaggacccaggttgcacagcaagaggtgagtgtcaggcgggcgagcgagcattaccacctgagcttgcctactgtccagtcagtggtgacattagattctcataggagtggaaaccgtatcgtgaactgcatatgtgagggatctaggttgcatgcttcttatgagaatctaatgcctgatgatctgaggtggaacagtttcatcccagaaccattccataccccgccccctcatctgtggaaaaattgccttccgtgaaactggtccttggtgcgaaaaatgctggggaccgctggtttagattatgtagagaatgcttacatagtactctttattttaatagtatttcttgtattggtggtgctgcctcactgatagtgatggtagccctgtaatcacttaatccttgttcagcaggcatccatctctttggccttaaaaatggcaaagctgaacttggtgtgtccctattgtttaacatctcttataggcctcagtttcttcatctacaaaatagggaaaaataatatgtacctcatagatctgttaggattaaacaagaacatgtttataaagttcttaggagcttagatatctctttatttggagagctaggaaggacaattcattggaaatatttcaggtgcgtatgaatatgatatctcttttaaccaccattcagtttctgacttactgtttcctagtcagcctcaccccacaattgtaactatctcttaacctagtggggaaaccaagccccattttccttacagaattttggagggtaaattgtggtaggtgttgtaggggtagttgcttgacacttaccccacaagcaggcttcccttacttttttttcttttttttttaagtctaatactcagaagttgccttcttttttggttcattagaattataccagccctctagcataccacacagtcacaatatatcaatcgtttcgggtgtccagacagctaacattttgaattcacattcatttaatcctcatgacagatttagtattttcactttacagatgaggaaattgaagcgcagagaaatttaagtagtccaagatcacaaagatggtaaggtgagagtaaggaatcaaaccaactctgtctgactttccagcttatgctctaacaattaccttataaaactttttttgtttaaaagcacaaaatttagagcaaattactcatagacagtagttgcttcaaggatgtgccttctttttctttgcactctccttatgctaattattaaggcgagagtggcagttctatgttccctcccccccaaaaaaaggaaggaaaagaggaaaactaagtttcagtgctaaaatatcttgtggccctgggtatgcaggattgcatatctgaccataactagcctagcagcgagttccctacggatagctaaaatacatcattttgaggtggattagctaccccccaccccctacccctttctggcatttagcttctccagctccatttgagtagagttgtggttgggtttgtagaactcattaaggttggacactattatggtgatgtggttttgagaagatattgcaatagccctcagaaaaggaactagatgctgcagttccttgtcagaagtaaacttggagcgaaacacgcctttaggaggggtaaccaggctgctttcctctatttttaaagctgtagtatgaagccaaaactaaaagaggatgggcttgcgatattcggggtgcttgggcagccatgtgtgagtatcagcttccagaccaatgctttgttaatcttcattgtttattctctgacattttctctggctttttgctgtaactcaacctgaagcatcattgaacttccctgaaggacttgtgttgttaggatcagaaaagtgttcttctctgcagttaagttaatttgactgggttttctatgtatgttagcataaaaccccattgttttcttgcgcatgctaggcaaggtaagaaggcagagactgattggttgttgattattgcatggcaggtagaatgctagaaaattagttgaaactcatcctgggcttattgaattttgttgtatcatatacataaactgtggacacttggtttggatgctgtaaccttatctctgagaaatggcttctaatttgtgttattttgcatttgaaaaacttgctatggattttataaaacttataacaaaaaccctaatatactttattagcttctgataaatattacatcagacatccagttagtataatttgaatgtggtttgaaacttttttagaggtaggtttcgttgtgggtagtggaaggaggcacataagttttagagttagctctgagtacagattgtggccgtttcacttacagctgtgaattcttggggaaattattcattaagtctcagtttccacacatgcaacatggaaatacactgatacctgcctcagagtttttgtgaggattaaaagtaaataataaaccaacaacatagtcattttattatcgctatcaaatatgtaccgtacataattttatgtgctatacttttatatgactggcagcacagtaggtttgctttcaccagtatcactgcagatatgcagtgcattacaacattatgacagccgtaacatcattgagtgataggaattttccagctgcattataatcttactggaccatcattccatatatggtctatcatagactgaaacatggctaagtggcacatgactgtagtaaatattgttagcatccttcttttgttttgtcatttttgccttcctccccctagtgttttctcacccctccaagaataaaatcctagttcctaccaggactcacaaagctctgtgaaatctgaacctggtgcaactcttgagacttcatttcataacatttttctcattcccatagctctgtctgcacagctacactggctgtaacctccctggccagctcattgccacctcaggatctttgtacttgctgtacacattgcctgatgttcttgttccctaactctgcatgctggctctttcataccactcaggtcagttgttaggtcacctcctcagaaagctcttcagaagaagccgccatttccagtcgaagacattttctaccataagcacctgttttattttccttaagtgaagatttggatttgcgttttagaatacatacagagtaaataaaaattctctacacaattttgctgtaaacgtcttctgggatttttgtgtatacacttccttttagagaatatgtgcatttgaagtggttttgttgtttaaggtgtgagtgttcagtcgaatacctcttagtgccattttaaaatgtgatctaaagaaacattttgcttttatcttttctttctgctcattaatccacataaattactacactaaattgatttagaataaacagattgcttggaattaattttaaaatttattttttagccctcatttcagcccttagctctgtgaagccttggttgatttgcctaaacgctatctatctgcagaaccttggccttgttacttggaagattaaataagatatttatgatgaaaatgctctgaaaaactgaatacagctttttacaatcgttttatatttattatgtactgtgatttgttcctgatatttcacatttgattcagggaaatcatttcaacaaattatagagcttcttttgttgtcgtttttgttaggtgtggttttttttgtgttttgttgtttgttttgagataaggtctcattctgttgcccaggttggagtgcagtggcccagtcatggctcactgtagcctcgacatcctacctcaacttccgcagtagctgagactacaggcacgcaccaccactaactaacgcacctggctaacttttgaaaattttgtgtagagatgaggtcttgtatgttgcccaggctgatctcaaactcctggactcaagtgatttgcctgcctcagcctcctaaaatgctggattacaggcatgagcccccatgcccacacgacagaacctctttagaacatgactgttaaagctgatatttggatacttttgattttaatagcaataacaacaataataaagactgggtgggactgaacttttaaaatactcttgctattgttcagttggttttcagctttgctcaggcctatatgaagtttacctttgggagaaaatgaaaccttgtccaatgggtctatagcttataccacatgccgtattcctatctatgctatgcctcttatctcttctgccagtagtttttctccccagaatctgtgcacattaaatttcatttttccagtagttcatttttagaatctttgcttcagtgatgaattgaaaagttaaaaaaaatctgatcgcttgtaagtaatttgagaagttctctgacccaccttacctgtttattgtgcagtgctattatgagggagagtaaatcaatgttatatgtttctgcaaaagcagcaaattacaggagaaacatgagaaaagtcacatctagtttgtccaaaagacattatctctttatgaggacctattttattaatgtaactgtttttaaataggattaatcaactttaattataacttatgaaaagtgccgaatcaggtcagtgggctatataaaaatacgcaaggtcattagaagcttattggacttgttgagtatgggttcttttcttgaattttagtgatgataacctcacacatagttaagtgaacttcgtgcctgaagatgggggtcctgcctagacaaatgagcaaaaatgtgtcttttttcctgaactggaaaagctagtttacagagtgatgacttctttgtgattaaagttaccagtttctgtaagtatggaacacatcgcttctccattaagttggaagcttgttaatcagctgattttaacgttcaccattacactggagttttgggttcatatttagttcttaatctttctatcatgtttaagtttctcatgatcttcagaaataaaactggaagaaatggatgtgcattcctttctctcctgattctgttatttaaattggtaatcctacagggtttctgtttgattttgttttgtgtttttgccccacgagaaagctaaagaaactttttgacattttaaagatgagtgtgtactcctcccttccctttcccctccctcctcctcctccctccctttgccgtcccctccccctcatttcttggaaatttgacttttttttctgtcatcggtttgaaattactttattcagttatatcattctttccaagtttcagcttattttgtaagcaattctcttttttcctgttctcattaccactgttgttgatcttggtcaacagtggtaatgttctcgctttgaaaataattttcaggggcctgtgtttctcagcctcactaagtggcgtgaagcactggttaaacagaagacagttaagtagctagtaagccaataactgtcatggaatagacagagacaacacaagttctgacatagatcaacctagtttgtgtataaatacaaatttaaataatatttaaatagaaatctctatttcagtggtccccaattttttttggcaccagggactggttttgtggaagacagttttttcatggacctgtgggaggaggggatgtgatggttgaggggatgattcaagcgcattacatttatcatgcactttatttctgttattactgcactgtaatatataatgaaataattatacaactcaccataatgtagagttagtgggagccctgagcttgttttcctgcagctaaacagtcccatcagggggtgatgggagacagtgacagatcatcaaacattagattcacataaggagcctagatccctcacatacgcagttcacgatagggttcacgctcctgtgagaatctagtgccaccgttgatccgacaggaggcggaattcaggtggtaatgcaagcagtggggagcagctgtaaatacagatgaagcttcactctctagcctgcacttacttcctactgtgtggcctaacacgccatagactggtactggtttgtggcatgggagttggggacccctgctttatttaatcacttataacttataatcacttagatgctctaagtcatctggggggtgagaaggttggaaaagaaaaagtacattagtgagtgagtaaagattatctgggattgtttcttagatgaggatctatttgatgttggtgttggtctactgtgaactaaatataactgcattggagcctaagcgcagatgtctgcgtcatggtttattactcctgtgttcgtttcaaggagctcctgtgatacctgctgtctccacctaaaaaaaaaaaaaaaaaaaaaaaaaaaaacagtaaaaataaaataatcaattaattcttcctcttgctggtctgtcactcagtctagagtgctgtggtgagaccatagctcactgcagccttgaccactcgcctcagcctcccatgtagctaggactacaggtgtgcaccaccaggccgggctaatttttttttgcaaagagtgggggtggtctccctgttttgcccagcctggtcttgaactcttagcctcaagcaatcttctcacctcagcctcccaaagtgctgggaacacaggtgtgagtcactgcacccagcctatttatttatttttaataattaagttgtacataataatattcatgatgcacctgcataagacaggtttattttattatcagatattacctcccatattgtatggaatttttaataacagttgtagctgatgctccattttgtagtctgatagtttcactttgtcatatttttatctatttctatggtctttataaatatttttgaggccctcttttattatgagtaaattattcaactaatattgaatatcaatttctgatttttaaaaaaattaaaactagtgagtgctagagtgagccttatcttttacctactgattttttgcttctgttaaattatttccttaggctaaatttcaaggaattgtataattaggtcaaaggaaatgatgtttgcaactcccatattcattgcaatgtggccagtattaactctgcttttcttttttaagtaactgccacctgtaggttactttaatgcagtgttttacaaccttggctgcacattaaagtctctgcaggagctttaaaaaacactcatgcctgaggaccacctctagagattttgatttgatagatgtgatatgccatctggatgtaaggatttttttttttttttttttttttttaagacggagtttgactcgccgcccaggctggagtgcaacggcgcaatctcggctcactgcaacctccgccccccaggttcaagtgattctcctgcctcagcctcccaagtagctgggattacaggcgcccgccaccacacctggctaatttttgtatttttagtagagacggggtttcaccgcattggccaggctggtctcgaactcctgacctcaggtgatccacctgccttggcctcccaaagtgctgggattacaggcgtgagccaccatgcccagcctctggacataaggatttttaaaagctctccaggcaatttcaaagtgcagctaaggttaaaaggttactttagtgagattgagcttaacattgcatctgaaaattgatttatttgttgaatcaggttggtggcttaaatctgattcagtaagaggaaccaactaaatactttgatcacatcaataaatttatacgtctgtctagtataaaattgatttaactttaatttttactaatcttgtgaatgttggtatattagatatcgatgcatctataactaatacagtggcagtatgctgaaaatcacttttttcgagatcttgaaaccagtacagtaaggtaggactaaaaaatacaactttggctattggagtgatgtagtattccagaagttatggactcattgagaaagggagtgaagtagcccctcaggatgaaaagcaagagaaaaatgaccatagacgccatggactactaacttctgtacccatatccatagtacgcaatgatctagaacttgcacactagtctctcaaaatgtgtatttttaaaattatttatatttttagtttcgtctgtctgcattctctgctacaaaataggcagcagaggtaggtttgtgttttggtttagattgttgatccaaatgctggctggctccattacttagtagctgttaggcaagttactacatttctcacaacttcagtttcctgacctgcaaattacggtaataatattctccttcacagaatgattacgagagtaaatgagatgatgtgtaccaaatgcacagttcaatatctgatacattgttaagcagttgataaatattaacaataaaaggaagtggttatgttgtggaaatagaaaccagtatttaatgagtacttactagtagtatgcatattaagaatatatatctcggccgggcgtggtggctcacacctgtaatcccagcagtttgggaggccgaggcgtgcggatcacctgaggtcaggagtttgagaccagtctggccaacatggcgaaaccccgtctctactaaaaatacaaaaattagctgggcgtggtggcaagcgcctgtaatcccagctacttgggaggctgaggtgggagaatcgcttgtacctggaaggtggtggttgcagtgagctgagatcgtgccactgcactccatcctgggtgacagagtgagaatctgcctcaaaaaaaaaaatatatatatatatatatatatatatatatatctctgtccttatatcttaatccttgagcctctgtaagaaaactgctgttatcccactttccttttctttcttttcttttcttttctttttttttttttttttttttgagactgaatttccctcttgttgcccacgctggagtgcaatggcgcgacctcggctcactccaacctctgcctcctgggttcaagcgattctcctgcctcagcctcctgagtagctgggattacaggcatgcgccaccacgcccagcaggttttttttgttttttttttttttgtatttttagtagagatagggtttcaccatattggccaggctggtctcaaactcctgacctcaggtgatccacctgcttcggtctcccaaggtgctgggattacacgtgtgagccactgcacctggcccccacttttctttaaacagataaaaaactctggctcatagaagcgaaataatttgtcttagatcagaccatggtataaatgggattctactcagactttagcacctgtacttttcccataccacactatgatttagcctctagggaagtctcagttgaacataattagatgaatttgtagtgaattggtatttttttcctcgtaggaaaaggtaggttggtgtcaattttgtgaacaatatggtgagcaatgtgggcatgccattttccagcctgtcggaatcaatattgtccttcatttgagtagaatgtgcttgtttttttttttttttttttttttttaaagacggagaatgagaatttgggctaggcagtttgtccaacattttgtcagtctcttcaacgctcactattctgttgatcaatgtagcagatggtggactttggaactttttatcagagaatgtgtgttgagaaatgttctacttggaaggaacattcctttgactcataaaaaaatttttctcttaaagacctctttgctccttgttgcattcaaattaccctgaatacttcctgctgtgggcaccgcatgaactgttcctacaaaagccagccctttccacttaaagtagtgcagcattatataagggggagagcacaggctttgggagcagcccaacctggattcaaatctattacttgttagcaatgtgctaagtaagagggtgctaatatttattgactgcctactgtgtgccaggcattattaaataatttatttactatcctcattaatttccacaacaactttctttgctttttcacagcaaccttttaaaaggactgttacattttttataggtcaagatgcatgctcaaagaggttaagtatctagctcaagttctcacttcttgtaagtggtaaagtttgattttgaactgaggtttatcaaactgctaatgtatgtggtataccttgaacaaatatgttaatatttctgttctcaatttcctcatctctgaaaccggaatactaccactttgaaggactgataagaggattaaattagtgtacttaaaattttctgtcagtatctgtttaagtagatactcaaataatactagtttcttccctacctttagtaagtaataataacagaagaatgaagcaattttcacctctgcctttattaaaatgttttacatttaactttgtattttgaaaaattttgaactcagaaaagatgcaagaaacgtgcaatgaactcctatatatccttcatccaaattctccgattcttaacattggttacatttgctttatctgtgtgtgtatacatatacatatatagaattttactgaagtctttgagagtaagttgcagaatcatgaccttctgttcctaaatatttcagcatatatttcctaagaacaaggacagtcaatacagtaacagtgcatttatcaaaattagtaatttatcattaatacaataatctaatatatagtagtttatattctacttttcaccatctgcttaatagtgttcttttaagtatttttcctcctgatctggatcacacactggatttagttgtcatgtttagtctcctttgccacctgtgccttttgagccattactgccactacattgggttgtattagaattacttccttagattatctgtctcttcagagagtgatgatctcaaaccatcttaaacgttgtgagtaaaagagaagaatatttgtactcttctgccctggagtgaaatcccaacaaatacttgagtaactgtgtatgtcaagagattgtgctgagtggtggagatcagcaggtcaggagatacacggtcctggttctcaatggggcttccagatgagtaagattgttatagtgcagttcagcaagtcttgctgagctcacaagagagactgctcctggaagtgtgctggaaactagatacaattcagggctcccaaaggatgtttaaaaacaatattaattacctcatgacaggaagattgaaaatttcaaggtaatcatattgtcagcttttcatatcttaaagtctgttttgaaatcgggttgaatgtgaaaatctaagagactttaacactgtctgatgtagtagtaatgaaacaatgcctgtactgcatcattgccacaattggtggtaaagtaccatttcgtttattcagggtgatagtttcctcattggaattaaaaaaaaaaatcagaaggcagtagaaatctctatggaccttcctgcagtatttatattcgttcatctacagatctttctttcacttgttttttgtctggttttttaaagtgtcagctgaggctatggtgcctcttaattcaccaactgaaacaaccagaatttctagtgcatttggttatgctttcctgtcctgcaaggcctgatttggttacaatataatctttgttcacatttttcaaggtaaattttagatacccagccatagtcctctttatggcagaaacacaaggctgacggacaacttaattaccaactgtagatgtaggaagggcttccagtcaagagaatgctgagtagttattttacaagtctaaaggagactgaatgtggaagatggatttaaaatggaaatgtggtagtagtacataaagaaattctgtgctagaattgtagagcattcagatacacctaggattctaggtatgggcctcatagttcacctaagaaggagagtggacagagagagagcagggccttgcctttccttccctctactggtcctgtcacacatagccactctatttctgcatatgattttatctgaaaacatgcagctacttagaagtttgaaaactagtgtcttagttgtatttgtgaaattgtaccaagccatggtctctcaggttccttgcagctctgtataaagcctctgagctgctttattcacaggtgtttgctgtccattggttgcatactttgggaacataggtgcatggtaacattggtgcatggtaacattaagttagagcatactgtgaagcagatgatgttggaactaatggttcatgtgaactatttgtactatcactaccagtgctacagagagacaattcactttatttatactctattacagtgtcttcaaatgttcatctcaaatcaggtacattttgatcaatgctgttataccattttatcataatttaatttgcaacagttttttgccttagtggtacataagatgatggtgcctttacaagtaatagcatcttaattttgatgaaatatgctatatttagtgcataagatgccacacatataagggtaaaactcctcatacattctttcctgcttttttgcatctatgaaggtggcaataacttcagtaagccaaactgtggctaacagtaattaatattgagacattaatgttgagacagatgtcatgtatctttgtagctctagcctctagcatagtgcctaccacttaataggtgttcagtaaatgtttcattgaatggtcttttaatattagtttatgaggctagaccattaaaacaaagttttagttgggagtaattagaaaaaagaaaataacttactttttttttttttttttttaaatggagtctcgctctgttgcccaggctggagtgcagtggtgcagcctcgactcactgcaacctctgcctcttgggttcaagcgattcttctgcctcagacttctgagtagctgggattacaggtgtgtgccaccacacccggctaattttttatattttttgggtggagacggggtttcccagtgttagccaggatggtctcaatctcctgacctcgtgatctgcctgcgtcggcctcccaaagtgctgggattacagacgtgagccactgtgcctgaccggaaatgactgactttattcaagagaaaaataatttgtacaagtaaggcaagtaatcatagtatattacttagatcacctgtgtacaacatttctagatgcatagtaatgtagatactgaatactgatcctaccaaaattgtaacttttaaaatatttgtatatatttaagagatacaagtgcagttttttgtttttttgagatggagtctcgctctgttgccaggctagagtgcaatggtgtgatctcggctcactgcaacctccacctcccgggttcaaacgattctcctgcctcagcctcccgagtagctgggactacaggcgtgtaccaccacacccagctaatttttgtatttttagtagagacggggtttcatcatgttggccaggatggtctggatctcttgaccttgtgatccacccacctcggcctcccaaagtgctgagattgcaggcgtgagccaccacgcccagccacaagtgcggttttgttacatggacatattttgtagtagtggtgactgtaggcttttagtataaccatcacctaaataatgtaccttgtacccattaacaaaattataattattatgaagagaaaaggacaagctgtgtgcatgtgcttttggggaagaggggcagacactaagctaaatactcattttctatgttgagaagtcagtttgtaacctcattggtctccattcccacattcctcttctgtgtgcatgtccggttctgctttgtgatgctgttgtttggagatgtgtagtttttatgtaacatggcccaaaaatgttaggccaagattttatttgttaactggccaaaaaaaagtgataaagagaaatactttgtttactcgtatttttatattatgtaccaactttggatcttaaaccctcagtaaaatgcaactccagcagacgctgtcccacacctaatatggagcttctgttctagttagagagctgagaaaagtatataaatacctattaaatagcccaaagaggtgtgtgtgtgtgtgtgtgtgtgtgtgtgtgtgtgtgtgtattttttaaagccagtagagaccaggcgcagtggctcacgcctgtaatcccagcactttgggagactgaggcaggcagattgcttgaggcaggcagattccttaagtccaggagttcacgaccagcctgggcaacatgacaaaaccgtgtctctaggaaaaatccaaaaattagctcgtatggtggtgcgtgcctgtagtctcagctactcagggggctgaagtgggaggatcactggagccccggaggttgaggctgcagtgagctgagattgcaccagcacactccagcatgagtgaccctctatcaaaaaaaaagaaaaaaggaaaaaaaaagtcacaagagagtaatataataaggaggaggggaaagatcctatgtccatagagaaaagaatggaaaagcgatcagtaagccagaccgaaagatgggtgggttttggatagtctggaatccctggatgatgaggtgtctttgaggaatgcacatttacagtttggctgcagaatggggtataagaagattaattgtggctggaaaagaacatcggtgaatacggagaatggtgatggcccggcagaagagttgctggtgtggcatggcctatagaggcactgtggtagagtggaaagagatagtattctggctctgcttattagctgggtgaccttggtcatgaagttctgtggctctttgctttatatatctatacagtagagataggatgcttcgcagaattaagattatgatgaagagagaaagcctaggtgatacaggcacacatgtatttcactctcaatacaaaaagaacaacaaaaacgttgttttgttttgtagaacagagcttttgagcaaaagaatgatgtcactattgctttgaaacagttgtttctgatagattggggggtagtgaaggccctagggtaattgccccataacaagagtggctgtaagagtccaggtaattcagtcaaagtctgaactagaccagtgcctgtaggatttgaaataaggagctgaatgggggaagcattgcaaacacgaagtcaacatgttcagaatgttctgagcaagggaagtggtattgctagggataacagtggtttcataaatggaaataggtttggcattgctgctgcttttgattatggagtaacataaaattgaggtttgaaatttgaaggtgcccattagacaccctggtaaagacattcataaagtagttggaagtgttggtgcagaactaagagagactttgagtcaagagaaagagattgtgggggtgaattggggctgtgggaaaggatagatgaaagaagaggactgaatgcagagaattgatgtgttcacctctaggagatgaggaagaggagccagggaaaacagtagatgtataggatggatttttgtggatggcaaataagaatacattttaaaagaagaatcagatcaacatatttttttcttttcttttttttttttttttttgagacagagtttcactcttgttgcctaggctgcagtgcaatgcatcgatctcggctcactgcaacctctgcctcccgggttcaggcgattctcctgccttagcctcccgagttgctgggattacaggtgcacgccactacacccggctaatttttgtatttttggtagagagggggtttcgccatgttggccaggctggccttgaactcctgacctcaggtgatccaaagtgctgggattacaactgtgagccaccatgcccagccagatcaacatttttaaattctgcaaaactcagggttgacagggataaagaaaggccactgggccgggtgtggtggctcactcgtgtaatcccagcacattgggaggccaaggcaggtggatcacaaggtcaggagatcaagaccatcctggctaacatggtgaaaccccgttgctactaaaaataccaaaaattagccgggcatggtggcgggcgcctgtagtcccagctacttgggaggctgaggcaggagaatggcgtgaacctgggaggcggagcttgcggtgagccgagattgtgccactgcactccagctgggcgacagagcgagactccgtctcaaaaaaaaaaaaaaaaaaaaccactggattttgatatttacttatcactggatacctgtgacaaagctttggtagcattcagagtgagtaggaggccgggtgtggtggctgacgcctgtaatcccagcactttgggaggtagagaaggatggatcacctgagttcaggagttcaagaccagcctggccaacatggcaaaaccccatctctactaaaaatagaaaaattagccaagtgtggtggcacacgccctgtaatccctgctacttgggaggcggaggcaggagaatctcttgaacctgggaggcagaggttgcagttagccgagatcgcgccactgctctccagcctgggtgacagaacgagactctgtctcaaaaaacaaaaaccaaagtgagtaggagccagaccacaaagccttaaaatgttgaaatggctggaaaggaggtagagatggtgagactccctgaaggaaagaggaagaggaagacagaacatgtttcagtgcgttcagcaggatttctcgatgccagcactaccgagtttgggcctgataattctttgttgtagggagcagtcctgtgctttgtaggatcccctcctactcctgagttgtgacaaccaaagatgcctccagttattgtcaaatgtcccctgggggccatattccttgggtgagaactgatcgacagggttgaataaggattcctaccgctggagtggggaaggagctagtccagaagtgggtggaaaaccacaggcagccaggggatgatttactgaagcagggacccaaggagggcaggaagaaacagagcaaaacctcggtctagaagaggtatcctgaagttggagagggtggggaaatgcattgttgttgttgttttttttttttgtaatgacagttgttttggcttacattagatggcctcaagcttatcactgagaaaggagaaaaggtcttttgagaatgaagtaggcaaggttaatgtttggcattagaggaaattatataaactttaatcccagtgggggaagattagtgtacaggtgagtaaaaggattactgagcagcaatgaggcctggctgaatggaacttttgaagcaattattaaaaagattggtaaaatgtatatctcaaccacgctgatactttttatatttgtgcgttttacagactagacttatgtactttttttttactttttattttgcttatttcacaggactttgtagatttcaatgttattgaacttttatttcagttatttttaatggctacataatagtctatagatctgttctttaatttaccaatcagcgcttcagttactaactggttagattgcttccagtttttaatgaagttgtgccaaaagttgcagtaaacattcttatgcatagagttttgcgagattttactagtggacccagtaaaggttttatacggtggtaacacagagcaggaaatgtattttctgaaatgtcacattaatgaggccacccttgatccaccacatttaaaattgcaaccttcattcctgctttaatctctgtagcacttgctatcttctaggtgttttacttatttatcttgattgctgttgtctcccttgttcgacagaacagggattttggtttgcttcaccagtaccttaaatagtgcctggcacatacatacttgctgaatgaatggatgatgggacttacccagacctgtaggcgaaatgagtttggaagagtgtcagtagcaacagatattcatggaagccagtgggaagatacttgcaatgactgatctttagtatctagagggacaaggaagcaacaaaagtccccagggacatgaattgggagattgaagggttagtacctggaggtaattgtgacaacaaaagcacattcctctggaaggtgagagtgggagaggtagaaggtaagtaggctgtggttagagaaagggatttcccaaggtttagatattagaaatggaacagtttgagaattaaattctcaaatttaattttgagaaggttggtagaatactccatttcatggagaatggactgtatcactttttaattgctcctgccttggcaaacagtgtcctctaatcttgttatatttgggtcatgctcagtggtggtatataaagcaggttttgttttcagagatcttttttgttggaatatggctgtatgtgataatctgattaagcagatatgccactaatgtctgccacacaataaggcatgttagtgactatgtcaatgtaggcttgaaagctacattgatagagaagttgtctccccgctatttgacttcttgagtcgtttctttgaactgtcgagagtattttacaagtgcttttctgtttgaggtcatttcactcagagtatagcaacttagtaaaatatgtaaaacatgtagtatagcatatgccattcttattttaagctgcttttggggagccactcttgggtatggaagttgtaatagtagtttttggagtacactttattattattaccgtcagccagtacatgattttccattgccttatacgttttccactgtagcattaaaaaaaaaattttttttttattattacactgtaagttctgggatgcatgtgtagaacgtgcaggtttattacataggtatacacgtgccgtggaggtttgctgcacccatcaacccatcatctacgttaggtatttctgctaatgctctccctcccctagcccccaaccacctgaccgaccccggtgtgtgatgttccccttcctgtgtccatgtgttcttattgttcaactcccacttatgagtgaaaacatgtggtgtttggttttctgttcctgtgttagtttgctgagaacgatggtttctagcttcatccatttctctacaaaggacatgaactcatccttttttatggctgctactgtagcatatttttagctttaaaattccaattagtctcaggtgaattgttaatgacagacaggtgtgacttagtagaaaaaactggagagacagttgaagtaatctttctcatatttttcagtggctagatagcatgtctgtaatttcttaactctttagtttcttctatttcaaaacatgataatgatctcaaatataaccttcctcccaaaatctcagggatactttaccaatctattgtttgctttggtgggattataataactgtgatataggttgggaggccaaggtgggtggatcacctgaggtcaggagttcgagatcagcctggccaatgtggcaaaacccctgtctctactaaaaatacaaaaaaattagctgggcgtggtgggacgcgcctgtaatcacagctactcaggaggctgaggcaggagaatcgatgaacctgggagttagaggttgcattgagccaagatcgcaccaccgcactccagccttggcgacagagcgggactctgtctcaaaaataaataaataaataaataaataaatatgatatgatatgggatattcaaaggtgttaatgttgtaaggaaaggaaaaataacatttcatataaggaggaaagggttgatggaaagcataatctattattgtgcctgatctttgagctgctaggcaccttatcagaatgctgtttgaggagtgttttcattatgtttaaagctttcagagaaagtaggattttctgatacaagtagaaaaatagaaaaaagtagatatgtttttctacttttaagaagggaaggcttactaggaattatttttaaatgaatgaaagagtagaaggaggaagaataggcagtatccgtgtgtgatttctctgtgtcaaacaccatagatgtagttttttatgcacattttctctaattctcaaaacagtgcttagattataatatctgtgtttgcatattatgaaattaaggctcagaaaagttaagaaatttgtctagcatcatatagttaggagataaaattttgtacccagaaatctctaactctgtataccacactgtgtatcaaactaatgagaaagaatagtgacaccaacggttaggacttcagacatttacatttgtgctgaatgtagaagagggtgcttaacacttgaaatgcgtgctcaagtacaatagttaataatatgagattgtgtggggtatgattgtgtgcctcatccctgtttattgtatgccccaagattctttcatctgctgcaaaaaagcacagtgcagattatgtgtggtatcacagcaggcattacgggcatgggtatgccttctggatgcaagggtggaattggaggtgctgtagcctttagaggagaaacccacttgccttgttcaaatcagttggcgtataatggtggaaagttgttatatttgtttataatgatatgagttgagcaaacttgcttgttttttaaattttacgaattttaactttaagttcttggaaccaagtgctttattccaaataggatatgataattatattgacaagtgttgaacaatatgtcattgtaacagtttttctttgtgtaattgacttcaataatcttgagggtgttttctgcacctattgttagaaaagttggagtgcccttgtaagggttggagtgagtggttcttctcttgccattataattgactgtagttagcatatggtctaatttattttaagagcacctcttaataagccttgattttgttgaaaatcaggctaaaaccatcttccttgcacttcctcattacttggttgttagcataatattaactattattagatcccacatatctctttatcttgatctaaagaacattgttagggctaggagtcctgcagttttcatttaacccatttgtgatctcttgtgaggaggatggagctattggttatatgcctgaatcatttgggaggtatatatactaatttttgctgttgaacctcaaagaacaatcaggttagaaatacgaagtaagacttagaacgttaagcctatgcctgggaggcagaatgtatatatattaaccagagatgcttgcatgtagggagaatgctggagaaccagactcctggagcagtttatcctatgaaataccgtatggagactgttctgtgaggcatcatcgagagttggacatctatacattaacctctgagtctgattcacatcatgaacacccatttcctggagacggttgcactggaccaatttttaaacttatgaacatccaacagcaactaatggtaagtcagaaagcttttatttttaagtatatgcatgtgtatgtgtgtgttttgtatgtgtgtgtccccgccctcctccaatgaaccttgatataattagaacataaaaatgctttcctggtgggaggctgagacgggcggatcacgaggtcaggagatggagaccatcctggctaacacggtgaaaccctgtctctactaaaaatacaaaaaattggccggcctggtggcgggcgcctgtagtcccagctactcggaaggctgaggcaggagaatggcgtgaacccaggaggcggagcttgcagtgagccgagatcacgccattgcactctagcctgggcaacagagcgagactccgtctcaaaaaaaaaaaaactttcctggccaggcacagtggctcatgcctgtaatcccagcactttggaagggccaacacaggtggatcacttgagctcaggagtttgagaccagcctgggcaacatggagaaactctggctctacagaagttagctgggcatggtggcgtacgcctatagtcccagctacttgggggtctgaggcaggcagatcatgtgagcctgggaggcagaggttgcagtgagctgagatgacaccactgcactcctgccggggtgacagagcaagaccttgtctcaaaaacagaaaaagaaggactttccccaaagattctgagacctgtaaagcagtattagcagtattaaatgttaccacttacagatcagagctagcattaaggttgtagccgtagggggactgagaggtttttttcattggttttgggaataatggaagacacacatttcaggtacagaaatatgcaacaactagaactaaatttctggcataaaaggatatttgtctgtgtttggcttaactttacaaaatgaaagaaccaacagtttctgagattgttgccaaagaacaagaaccaaatttaatcaggagtatttttacaactattttagtggcgatgatatgtaccatttaaatatagtgttactatatttaaatcaatagttgtatggtacaaagatagctaaaaaaaacagaaaagattttataatccactcaagtcttcaagataaagttgttgccagacataaaaacattacagactccctgttagcatttattacgaataacataaacgtcatatgtgtacatctctcttgggcataacatctgaaaggctgtgtttaggtaatttttccacccagtttatttcagagctgatttgatttggaaaccactggacagtaatttcatttaaggtcagctcaatgccagaggcttctttgggagcatgcattatttgagaccagcaagccaagaaattccatagggttatgtgatgctcccacttttgtgttttagaattgtgtttgttccagagcacgtgacatttcattttcctctgaatggacttctaggcaatcaggtttttccttagagctctttttactaggtgaatggtagttcacttgaaaatatagttttgcaggtaccaaagctacctgccaagatatggaaatggttggcaggcaaatacgagaaattaaaactgtgggaacatacatgtgctactttctttaggcaacactacttgtttcgccagatttctgttttataatgtttaccatttattaaatttaatgacttcatttcctgatttttaggagactgtcgtactctcagcaggactggaaataagctaattttgaatactcttaaggagcctaacacagaagcttttagtgaaagtccattttgcttgtacactctactagaaagactttaacaagcatgacacattttacacttgtacatataaacttttacaataggctcagtaggtagataggaatggtctgatgatggaaccctgtaagtgcccaatatattcactgagtgagtaggtgaatgagaggatggatggcagtaggtatgcatattattgcagtagatcaggtaatgaatgaatggcgagcaaaccagatgtttggaaaaatagattttaggtgttgagaaaatatttttataagaatttttgaaattttgatataaaggtaaaatcactaaagatcacctgtatttgtttttctccattttaaaccttgctgcatgcacatgggatttttgcatatttataaacttagattaataatttttttctaattgcaatatggtcctcatagttaataatggctagtatttcttccatcagttttatgaaccttgattttcttaatcattcccatgctgttggttatatctgtttatattttttaaatactttaaagttgcaaaatccatttttgagattacatatagtatccataatatactctgacagtatataggtatatgttctcatttattttatatttaatatgttctgattttatcaaaaggtgaaagaatatctgccatgccactgttcctgaaattatgaccccataactcgatggttaagttagattggttggaacatattttggggattaaaggacactgaactcagtaagtatttagggcacaggcacattggctgcaccttgtaatggaaaagagctaggatttgtttttacttgtatatatgaggcagggtgtaagtagactctgcccttctgaagacaatgaaaaatataggtgggacacagtggtgtaggccctataatcccagcactttgggagaccaaggtaggaggatcccataggctcaggtgttggagaacagcctgggcaacatagtgagaccccgtctctacaaaaaataaaacaattagtcaggtgcaatggtgcacacctgtagtcctagctactgaagaggctgaggcggcagggtcacttgagcccaggagttcaaggctgcggtgagctgtgatcacaccactgcacttcagcctggcctcagaatgagagagcccaccttaatgttagcagctcaattgaagatattcactgagctttttaaaaatcaggtttttgagactcttttatttttattttttttaagacggagttttgctcttattgcccaggctggagtgcagtggtgctgtctcggctcactgcaacctccgcctcccgggtacaagcaattctcctgcctcagcctcccaagtagctgagattacaggcatgcaccactacgcccagctaattttgtatttttagtagagacagggtttctccatgttgaggctggtctcgaactcctgacctcaggtgatctgcctgcctcagcctcccaaagtgctgggattacaggcatgagccaccatgcccggcgagactcagttttcatctacttcctaaaataagttcaaaatttagaaaatagatatttcatatatcctaatctattttgaacatcccagtatataggcagatatgaaaggaaagtaatatcagaaataagaggaaatttatttgtattcttttagattcgcttatcatgtgaccttagaagagctagaatagaagtgagttctgtccaacagaatttttgctcagaggtgtcagtgacatcttctcctacaggcagttttttaaaagtgtatttcatttcctcctagaaaacaaacctcaagcagatggacagtcttatgcccttaatgatgacagcacaggatccttccagtgccccagagacagatggccagtttcttccctgtgcaccggagcccacggaccctcagcgactttcttcttctgaagagactgagagcactcagtgctgcccagggagccctgttgcacagactgaaagtccctgtgatttgtcaagcatagttgaggaggagaatacagaccgttcctgtaggaagaaaaataaaggcgtggaaagaaaaggggaagaggtggagccagcacctattgtggactctggaactgtatctgatcaagacagctgccttcagagcttgcctgattgtggagtaaagggcacggaaggcctttcgtcctgtggaaacagaaatgaagaaactggaacaaaatcttctggaatgcccacagaccaggagtccctgagcagtggagatgctgtgcttcagagagacttggtcatggagccaggcacagcccagtattcctctggaggtgaactgggaggcatttcaacaacaaatgtcagtaccccagacactgcaggggaaatggaacatgggctcatgaacccagatgccactgtttggaagaatgtgcttcagggaggggaaagtacaaaggaaagatttgagaactctaatattggcacagctggagcctctgacgtgcacgtcacaagtaagcctgtggataaaatcagtgttccaaactgtgcccctgctgccagttccctggatggtaacaaacctgctgagtcttcacttgcatttagtaatgaagaaacctccactgaaaaaacagcagaaacggaaacttcacgaagtcgtgaggagagtgctgatgctccagtagatcagaattctgtggtgattccagctgctgcaaaagacaagatttcagatggattagaaccttatactctcttagcagcaggcataggtgaggcaatgtcaccctcagatttagcccttcttgggctggaagaagatgtaatgccacaccagaactcagaaacaaattcatctcatgctcaaagccaaaagggcaaatcctcacccatttgttctacaactggagacgataaactttgtgcagactctgcatgtcaacagaacacagtgacttctagtggcgatttggttgcaaaactgtgtgataacatagttagcgagtccgaaagcaccacagcaaggcaacccagctcacaagatccacccgatgcctcccactgtgaagacccacaggctcatacagtcacctctgaccctgtaagggatacccaggaacgtgcggatttttgtcctttcaaagtggtggataacaaaggccaacgaaaagatgtgaaactagataaacctttaacaaatatgcttgaggtggtttcacatccacatccagttgtccctaaaatggagaaagaactggtgccagaccaggcagtaatatcagacagtactttctctctggcaaacagtccaggcagtgaatcagtaaccaaggatgacgcactttcttttgtcccctcccagaaagaaaagggaacagcaactcctgaactacatacagctacagattatagagatggcccagatggaaattcgaatgagcctgatacgcggccactagaagacagggcagtaggcctgtccacatcctccactgctgcagagcttcagcacgggatggggaataccagtctcacaggacttggtggagagcatgagggtcccgcccctccagcaatcccagaagctctgaatatcaaggggaacactgactcttccctgcaaagtgtgggtaaggccactttggctttagattcagttttgactgaagaaggaaaacttctggtggtttcagaaagctctgcagctcaggaacaagataaggataaagcggtgacctgttcctctattaaggaaaatgctctctcttcaggaactttgcaggaagagcagagaacaccacctcctggacaagatactcaacaatttcatgaaaaatcaatctcagctgactgtgccaaggacaaagcacttcagctaagtaattcaccgggtgcatcctctgcctttcttaaggcagaaactgaacataacaaggaagtggccccacaagtctcactgctgactcaaggtggggctgcccagagcctggtgccaccaggagcaagtctggccacagagtcaaggcaggaagccttgggggcagagcacaacagctccgctctgttgccatgtctgttgccagatgggtctgatgggtccgatgctcttaactgcagtcagccttctcctctggatgttggagtgaagaacactcaatcccagggaaaaactagtgcctgtgaggtgagtggagatgtgacggtggatgttacaggggttaatgctctacaaggtatggctgagcccagaagagagaatatatcacacaacacccaagacatcctgattccaaacgtcttgttgagccaagagaagaatgccgttctaggtttgccagtggctctacaggacaaagctgtgactgacccacagggagttggaaccccagagatgatacctcttgattgggagaaagggaagctggagggagcagaccacagctgtaccatgggtgacgctgaggaagcccaaatagacgatgaagcacatcctgtcctactgcagcctgttgccaaggagctccccacagacatggagctctcagcccatgatgatggggccccagctggtgtgagggaagtcatgcgagccccgccttcaggcagggaaaggagcactccctctctaccttgcatggtctctgcccaggacgcacctctgcctaagggggcagacttgatagaggaggctgccagccgtatagtggatgctgtcatcgaacaagtcaaggccgctggagcactgcttactgagggggaggcctgtcacatgtcactgtccagccctgagttgggtcctctcactaaaggactagagagtgcttttacagaaaaagtgagtactttcccacctggggagagcctaccaatgggcagtactcctgaggaagccacggggagccttgcaggatgttttgctggaagggaggagccagagaagatcattttacctgtccaggggcctgagccagcagcaggtaagcaaaacataatacaaaattaacagtctgagaagcagattcccttaagagtcactgtggtgtcctggtaaaaatataggcatctttgttgttttgaggccttgcactcattgggtaggtagccaagttaatagtcaccaccatcaggaggggcacgtcatctcagggttggacagattttgcttcctgtattgtagacttactgcttggttgcttaagcttataaacactcctgtctcattctggagtggttgcaactttgcaaacctagaaaacaatgcctagatcacaggtactctaaagtggtgaaagaatttagcagatgtttttattcacatggcttaatccttttctctagtaccatagaaaacagtgccaaaaagctgtgttttatctacaagcctgaaactcccttcctcccctatcatcctagtctgtattctgagcaaatttagagtcagagtggtttcatgaacagctgtaagtattgttctgagctgacttcccaacatccaaaatggtggtattaggtcattggtggttttttgtttgtttgtttttgttttttttgggctaggggtgttgttgacggggaactccttccttttcctgcttggggagtggacctctagttccattgcctgttgcttttgggcagcagtctgagaattcaagaccctgcacagtgcaggggataggatgcaggatttccgcccaagcccagtctgctgagctgctgtcacagggcagaccttgtgtctgctttatcttggtgaagcagctgcactgagcagattgctcacacagcagcctgttccatctgtgggtaaccatgttccgaggcagcaaagagaaaccgctattgctccgtggaaataaactatctgaataaaacttcttaacgggggttgaggctgaagctgaaacgggagtcggacacgatcttggctcctgaagtctttaaaggtcagtttgatgcacacttctataccaccacctgttaccagctgtagacagaagacctatctccatgcttgcccctaggcttttgtaggtaagaagcagcctgttttgtctttattgtttatttttgctgttcttttcaatttttgaaaatccctttacacatatgtattaagaatgtgggggagggttatggagagaaatgaatcaatggagcaaaagaagttgctttggaagaagcgcaatttaaatacagtggttattttccctggtaaagggcttttagccgtttataatctttttcctccccagttgagggatttaaggaatccgaggtagaatttttgatgactttagctttttagttttattaatgttttggattgttagtgatagatacttgctggctgttgtctcaggatttaaatgaggtctctaatttttaaaaaaagccacaacaacaagtctattttgggggccctggcaggttggcatttcagaagaatgggagtggctgtaagctgatgcctggtgatgttcttttcatttcggtgctgcgtccttggccacatgggccggaattatttctctttctggctcagtggtcagaatttgactcaagcaagtgtgaactctgtggggattgtgtctgtagtatcctatgagaaaaagtaaaaaccagggagaatttcagactttgatttttattagcacatatagtaaagatggtgagaaatgacggatgtttaggattttgaggttttgagaaggaagaaaaatgtatggactttcagcagtatatatgggcttgaggttggtaaattttgtgtaggtgagttacttgtcctgttaccaaaaggagtcatactcatggtctcaaactgcagaggaactctgtattgatggtctcagactacagagaaagtagccagtcatgaagaaattggtactttcttcagaaaatggccaggattgggaaaatccctggtcacattactttagagaaaaagcacctgagtgtgatctcagagccaaagggtattttctatcaagtttacattctactcatagatttaatcatactgttttgtgagtgagaagacataggtttaactgctgatttggaaggagccagtttgaaagaaggggatgtggcccttgacccaccaaaagcattgaccacagtgcttaggaaatcagtgatgcatgactgagccacgccagtcctgcagaggctgccgacacccgtcaagtgtgagtaatcactgttttctagtgtgactggttgctgtgccaagatgcatcttttcaaagttgataggtataggaaaggaaggaggtaccaaaaatcacatccccagaggaaagcaaccctctttccccccagaaattactctgactcacttagagatgttttgatcaagggatagttctaaggggattgcttagtcagattttaactttaataacattttatgaaatttaacacagattttggttctttgggcaaggaaacttgtttacccatttttaaactgctggtaagattatataattataaggtcaaagaaggaagaaaagaggttcatctatagaaatgtaactcttacaaatttaaggtagacttttgtacatgtcatgtgctcctagaataaaatcttaatataatttattctttggtgaaagaaacttctgtgctctttagtgtggggagcatttttcttgccagagtagtggcatcactaggttaataaccacagatgcatttccacatgaaatcgagatgacagttccatttgcatttggattattaaggtgaattttgactgttcaatcatgagtcccgtttaaagaagtgtcagaagcctaaatttgcctcagacatcatttatcatttccttcctgtatttgcttgaccatgtggtggtcaggtaacaaaaaccaccactgtttttggtctgtcaacatggccagcaagaggacaactatgtaattcttgagaaaacatgcgcagaaacgtttctcttaagaaagggatagctagtctgtgattaggtttcagttttggaagaaataagggttaaaaataagacgtaactgctgagtagttcattcttactggttacagtgatgggtggatcagagtgtgttgtatgttagtgaaagtcatacttgtcccagaggctttttctcattctcagtggctttttcctttttgttttgtacaaatccttgcttttttgatgatggccaagatggactacctagcttcagctattaatctgttcccctgaagcttatgaatttagttttccatatgcaagttggtgctacactcagatttgtcataaaaagtcaatagtgaaatggatgttcaaaagacattgaattggatcctcgcttagttccaagcgcctacaaaggctagggaaaaccagtaaccatgcgataaaggaatagctcagcatagggtcagaaatgacactagccgctgacaacaaaagaatacttttccattttaacgcaaaagcaaaacaaaacacatgaaacctggagcatgttgtatgaatagtaaggcacaggaatcagtttttaaaaatgtactctgtaacccccctgcactttcagaaatgccagacgtgaaagctgaagatgaagtggattttagagcaagttcaatttctgaagaagtggctgtagggagcatagctgctacactgaagatgaagcaaggcccaatgacccaggcggtaagtggcatcagtaagtctataagggcacaaaatgtgtttatcctgttctgctgtgtcttatttatggctttgtcttttatttgagggtaagtgggcaaaatagtattttcccccttccctcttgtgctgttatataaatgtgtttatgttgctgcagctaagctttcataaatggtatataccatacagcaaagttttggaatgggctgttacatgttttcttatagattatgctgaaaaacattttccccttgagcacaaggctttaagatttgtcagtaagcttaaattgtcacaaaatctgagctatcacaaaaggggatctatagaccttttctttctttttttctttccttctttttctttttcttttttttttttgagatggagttttgctcttgtcacccaggctggagtgcagtggtgtgatttcagctcactgcaacctctgcttcctgggtgaaagcgattctcctgccttcgcctcctgcctaatttcagctgtgagtagctgaaattacaggcatgcgccaccatgactgactaatttttgtactttttgtggagatggggttttgccatgttggccaggctgttttcgaactggcctcaagtgatccacctgcctcagcctcccaaagtgctgggattacagatgtgagtcatggcactcggcctataaacccttcttaaacctgactcttctttctttatataaaaactgatagccaaaatgagatttttactttatagctcaatagtaactgtctaaattatgaagtatatcgttttcagcaatgaaaaaacaggttcaataggccagacgcggtggctcacacatgtaatcccagcactttgggaggctgaggtgggtggattacctgaggtcggaagttcaagatcagcccgaccaacatggtgaaaccctgtttttactaaaaatacaaaaaaattagccgggcgtggtggcaggtgcctgtaatcccagctacttggaaggctgaggcatgagaatcatttgaacctgggaggcggaggatgcagtgagccaagattgtgccatagcactgtagcctgggcgacagagcacgacaccttctcaaaaaaaaaaaaataagagaataaaaggttcaatcaacattttttttttgttttaagaatagtttgttttgggatatgattcacataccataaaatccacccaatcaaataaagtgcataggtcattggttttaaatagatttacagagttctgcaaccatcgccactaaggctctaatttcagaacattatcactctaagaagaaaccccagacccattagcagtgtgcctttccttcactcttccctcccccagctcattaatctacttttgctttctgtaaatccatagagagatttgctgtgagagtgtgaaagtggctgtagatagtacgtaaactgcccattccagaacttcatgtaaatggtataacacaatatgtgatcttttgtctctggcttctttcacttagcgtaatattttcaagtttcatccatgttgtggcattgatcagtattttatttctttttattgtcaaatactgttccgttgtatagatataccacatttttttgtggatttggattgtttccactttttggctactgtgaataatgctgttatgtacatttgtgtacaaaattatgtggacatgtttttatatacctagtggagttgctgggtcatatggtaatttccatttatttggcttcaaaaatatttttcttcaaggtcttgagattatttttctttgtttaaagctattaacttttattttattttattttttatttttttgagatgaagtcttactgtcacccaggctggagtacaatggcaggatcttggctcattgcaacctccacctcctgggttgaagcgattctcttgtctcagcctcccgagtagctgggattacagggactcgtcaccacgcccggctacttttttgtgtttttagtagagatggggttttgccatattggccaggctggtctcaaacttcttatttcaagtgatccacccgccttggcctcccaaagtgctggaagtacaggcgtgagcctgtgcacccagccagctattaacttttaaaacaaacttgttgagagaaacagtgccctatgctttagattccatggtggtcaaaaaaaaaaaattagaaagctgaaaatcaagttagtgaacttactcatgctgcccctttgaaagtccatgttccttgggctacacttgacattgcactgtttttactcttcagaggactaagtggtatgtttttttgaaatttcacggtaggtaaatggaacagactatcccagattgtttcaagagtatgaacagtgatgaacaaaccttgttgtattggagtactgtggtatgaaggtgctgactgttctaacccgcccttattacacataatattcatgactaatgcctgggtggctacttgtaaagcaggcattattcagacaaatgttgcttttacccctgtgagaagaaaagagaacacaccctgcatgggtacgtgtgtctttgtttccagaagccccttagaaagggaaggaaaaaactcacatccttgaattcaaatacctctgtttcttagtactccattttaatattgtagtgattagagtcattgaatccaggctggtacttggctctagaccctttgctttctgatgagggatatctctattctaatggtatcttgtctactataaagaagaaaacaaaacatgacttaaagaaaagaaaaggtctcctctctcagtccctttcctcttctccttttttctctagttttaagagttgagagagtgaatattcctctggttggtcagcatacctcaatttacagataaaagaatagacccttggagagtcacatgactagcttgaggccaaaggcagctggaagagtttgaggtttgatttctaatctgggacttacacaacagggcgattcctccttgactcaagaaacctgggctctgattggtaaagttgctataagaagcctgagaaccatgtaatttatctctagctgcgagatatcaatgccttatgctttgtgtttgcttccaccgtgtagagttggggaaagcatatgtcagtgggattttcagttcttgaggatttgcaggcctaaattcaggaagtttttgtgttcacagcattcttataatgatgtgaaatctgactacttaactcttctccgtggtgctctgacaaacttgccttatttgctgtgagttgaaaggataaaacagacacacactttaatttttcccatttaactcttcacatactatattcatataggttttcactggatggggaaagagagcagaggtcggcaaacattttgtaaaggacagattttgtaaatgctttgtgggacatatggtctcttaaaactagtaagctttgctgtgagtatgaaagtgtctgtagctagtatgtaaacaaaggagtgtcactgtgcttcaatacaactttattatggacactgaaatttgaatttcatgtgatggtcatgtgtcgtgaaatattattgttttgaattatgtttccagccattaaaaaaatgtaaaatctcagccgggcacagcggctcatgcctgtaattctgccactttgggaggctgaggcaggcggatcacttgaggtcaggagttcgtgaccagcctggctaacatggggaaaccttgtctccactaaaaaaaaaaaaaaaaatacaagagttagccagaaattgcttgacccgggaggttgcagtgagccgagatcgcaccactgcactccagcctgggcgacagagtaacactctgtcttgaaaaaaaaaaaaaaaaagcctactcttaattttttttcatgggctgtaaaaaagagttaatatcccactggcaatagcatgtgagcccctgcctaataaatacttgtgcaccagtggaagaaaagaaaaaagaagcaagcagatttcttaaattgttttgtggtgaaacctctggtttttaaactacaggttgggagtgggatcaagttctgtctttcctgaatagctttttgacagcctctctagggctcagtttccttgtctctaatcattctctagctttaaccttctagagtctgttttcatgctgaaaagggttagagtctatgattatatttgagggaggagtggcatttgtgtaatatttaacctgatctttctgccacataccccgtctatgtgtgtgccttgggaataggccagtcattgcttcattgaatcattgaatcatcctctccaaatgtaaaatagaacaaattcctgtatcttatgctttgctaccggcttcaaaaccagtagtatggtaaatttatggcagttttctaataaatgtaaataatccatttaaattcttatggaagttttgtaacattctctaaacgtgtaatggtcagagcataagaacctctgtcgagtggcactaccaaggatttaaagaaaaaagctacagctgagttcttgttttctttagtcctttagtctgctatctgtcatacaaactgaggagtaatttttcattccttaacctgtttgacacatgtattgtaaataaatccttactttaaaggtccagtgctgaaaatcatagttcatgaaggaattagacagtatctgcattcgtttacttatattctcagagaaaacacaggtatgtgttaaatgctgcagatttcttgatagtctttactgatatttctttattggggtgaaaatgttcacaatttttgaggcaaagttattactttacacatattgtggtttattcccattaatcattttatcattttattttagccaaagttttaatgcccattgcaatttaatattcatcattacctccacctgtatgctttactggtttgaaggtattcagattacctttcgttgtcatctttttttccttagtgagttaatatatatcaagtacttagatcagagcctggcacaaaataagtacagcttagtattattattagtttagtaacttcagattacaatatgctattcacttattttagtaactagtggaatatggtggttcagactcagttactgcttcttgaacatgttataaaagcttcaggaatagtttcttacattaatttgaaattgaaagacatggaacttgttttgcttctgagaccgttacaatttgaaagaaccttaaagattttctgaagtccagcacctttgctttataagagaagaaatggattcaggatagttaaatgacttaccttgtttcacagctagttaactgtcagctggactagaacccaatttctatgtgaataatttttcccattatactatttcctgaagaatcatctgagggtacacttgggaagtcccatccacttggtttaggatgggtttttgcgttttaaacaagcatccctgaatgatacttaatgcatgctaaaattctaaagccattgcattatactttcatgcttttggtaatagttggagaaactcctttagccattttaagatgtaagctgatatactttaagtctcatgttcttactataatctgtttagctgcaactaaataccactaagatgatgtttctccaaaatgcttgcttttggtgcagaaattaggaagattttttagacctgccttttatttcctaaagaatgatatgatattgagccagatgctggaggcaagcaggagatgacattgaatacttaagttcagaaaaagttcagaaaagagggccgtctgacaccattcgccttcatagtatgtcccagtactgcaaaccaatatcgtatgttgtagggatcttttctcttcaagatatggccaagttcattaggaaggaccttctctccctggggcatctgttcattgaagtatctcaataatagttccttttctgaatgctctttgcataagcttattagccgtatggaacagttaattctacaaaccagtatatattgtcagggctcctatggtcctaacagtcaaacactcaagaacaactatgttcaaggacaactgtaaaatcccatgtgttgagtattaggctactgggaaaatctactctttatttaacataccttcctcaatcaagaaagcatttaaaatcagaaccatgatctttttttttttttttttttttggcaattatacagccaaacatcaaattaactgaatttccattcttagttatttttacaacagtattcatgtttttttcttcaggactgtagtaagggcattgttggtcttagaatattgcctgttaatatcttcctgaactatgtccttttattatatttaatggaacactctgttttctttctgttgtctaaagggggcgaacttgtatttccatccctagtctaggaatttggttgaaagcttttgtattgtgtggctgttcacagacttcatgctcagctgccgtgggaaaatatgacagcctctaggctatttggtgactaatccaacaacttataatgctgatattcaaaatggcttgtacgtcccaccctgttatttaatagttgtcagtttttaaaaaggtcctttaaaaatgtttctgccatcatattcacatagttttgtggtgtgtgtgtcacctagggaaaggcaaattgcccactttctgagttgccagaaagtcttatctgcatacatttttggcatgtaagagaggcaggctctccttaaattatcccatataggtccaaagctagagctagcatcaaccacacaaaatttaattctcagtttttttcatgtagattttttggagactctctgtatctcctctgaaatggagagtttccaggaaattatcagcggctcctaatacaaatttttaatacaattgtggaaaagaagtacctcagagaaccccagaccataaagtcacaagtggcaaaactataaacttagtgtaaaactacccatagataatgtatgtaaaggtataatttaatgatctagttgtacatttttaagtgaccttaagcaagttatttaatttctctgatctgtgttttctcctttgtgtaatggttaatctctagtttcttccagctcttaatttttgaccagtgtgtgattatgaaatgattagaataatttaaaaaatactgtaatcccagcacttcgggaggctgaggcaggtggatcacatgaggccaggagttcgagaccagcctggccaacatggcaaaaccccatctctactaaaaatgcaaaaaaattagcagggcgtggtggtgcgcccctgtaatcccagctacttgggaggctgaggcatgagaattgcttgaacctgggaggtggaggttgcagtgagccaagattgcaccactgccctccagcctggaaggcagaatgagactctatctcaaaacaaaaacaaaaaaacaaaaaaacagaaaaccaaaaacaaaactgaggatatcttacatttggaccaaaaggacaatcatgagggattttttttttcttttttaaatttgagacagggtcttgctatgttgcagatcttgaactcctgggcacaagtgatcctcctgccttggcctcccaaggtgcaggattacaggtgtgagccaccatgtgggaatttttttttttttttttaaatcacacattctttaacccaatccttaactaatcacttttgtcttaaatgttttccaaggtgttttgttctgggatattaaaatcaattatattagaatctgcttttttctttcatagaactgctgaatcataggtcatatgtgcattttagaggggatgtgtgtctcatgccaccccctcttgagtgaaaataactgtatctgagtcttaccactctttctgtctactacttacactcatttctcttttgttcattcgtattatattgacagccaatgataatagctaagtataagggaaagattatggagcccagtgaattagggttttaacctagttttgccaactaccagctgaataattttgattcatttatttagaggctgtttcctcatttgtaaatttgggatattgatgcctgttacaaaggttgtttgtattaactagagttaggaaattctagcctataataggcattttaaatgcaatagatataattctaatctcattttaaagtaactcagaattattaggcccatcttaagacagtatgaatgagtgattttagataatgatttttaaatggtcttggaagaagctatcagttatatcaggccacagtggtactcatttaactttccatgtcactttatgtttactgcaagggtgtactaatttattcagtactcagttcaacaaatgttcattgaactctgtgctaggcctcagatatgctgaaatgaaagtagatgagtctctgcattcaaaggctcatattctagtaggaaaggcaattattaaaccagtaaatcagacatattctcaagtgttaaaatacaggtaaacatataggtgcttgtgaaaagataactttcagtgaaatggacgctaaattctcctttctaaggaagtttttaaagaatattatattatttttacactgtgggaatgaagatatatgcattatgtatcagaaatataggcttgggcgtagccattatttctaccagtaaatttggaagggctaccaataggtgatctcttagaaaaaactatgtattgcttgtagttctaagttctgtgttgcttactgatataaatatgacttagagctgcttgtttttgcctgtaaaagagaaagtttccatagtagaaaattaaaagagagatgtcatttgatctttgagaaaggcctaggtccacctcagggatctacctgggtacctacaatttaggcagttttagatattccatattaggttttgattgtggattttaacaagagtctagtgatatgtcgctagttgaccaccagaagagtaaatgtgtacactatttacggagttgtccactatatatggagttgtctactttatccagaaaaagtttcagggtcaccaatttcagatgtttctagtctcctaggctgctcaattttgtgatattagcctgtggctttaatttcattcatttattcatttagtaaacattaaatgattatttttccctggacaaattattgcatcaaatttggagggttttttttgtttttgtttttgttttgtagagatagggtctcactttgttgcccaggttggagtgcagtggcgtgatcatagctcactgcagcctcaacttcctgggctcaagtgatactcccacctcagcctccagaatagctgagaccacaggtgcgagccaccacacctagctaatttttaaatttttgtagagacacggtctccacaatgttgcccaggctggtctcaaactcctggactcagtgaccctcccacctcagcctcccaaagtgctgggaatacaggcatgagccactgcaccctgccaaataccagataatttttgaaagttaggtatcctttttgccctcagcatacctagaatctagttaaatttaaaaaagcaaacatatacagatataatcacaatacatgaatgcagtatatgagacatgttatcagataccattaatgtgctataggagatcagagagaggaatacttcttgaaaagtgcctgtctgaaacgtaatggtgtttccttggtgagacccatgttgtaccacaggtggtatcaatagtctattggcaagaacagggatagcttcagggagccattgatatgctttccagccttgtagttatttttttactttcacaatacgctcagcccttcgaagatcatagaattgcctaaggattgccagagacacatcagtttgcaaggtaactgatctggcagtaatccaggttaaaaaaagaaatttcattaggactgaaaaacataaaatttaccacagaatatgaaaaatggaagtattcagtagtatatgaaccatgtggaaattgaaacaagtagtatttctgtttaaatatttccattcagccattgaaagtgtgtgttctcccttcctgcctctttcatttcatacagtgatgtagacattttgcttccattctgaggacacccaaaaccctatcactgctgtggacctgagcaactgggacagtgtcttaagtgtacatatgaagtcttcaaagaaagttagttgatggtgaaaatgcctttcataaagttcagggcagagaatactcttatgagcacatttaaaatatctaagtttaaacctaactcagaagtcagagtaagccaaaatgtttattgtattgatcttctttttctgtagttggcatttgctcctgactgagtcattagtattcatatatatatttaagagttttgaaagcatagttgctgggtgtagtgactcacaactataatcctggcactttgggagatcgaagcaggtgtattgcttgagcctaggagttcgcaaccagcctgggcaaaaccctgtctctaccaaaactacaaaaattagccaggcgtggtggcatgctccttgggaggctgaggtgggaggatcatctgagcctggggaggtggaggctgcggtgacccatgattatgccactgcaccctagtctgggcaacagaatgagaccctgtctcaaaataaaataaaaaacctagtcactctggggttggaatttggggttatggaggtataaaaacgagtcagacttttcacatgtgatttcagtgtttgtactgaagatggttgcaaaagatttctctaacagtttgaactaattataataggaataattggggtaaattgtatagcttcacagttggcctttatggttaaatacgtatttgaaaggataaatttggcttggcgctttcatttatgtgagatacgtgtgtatgtgtatgtttcttttactgtgtagagtatgaagtaccttgggagtggcacatctgggaagtttttgctgaaccccttctctgaggcagaaaaaaaacatggtggagaggctaagtagttaaaaattatgaattattttattgcttggaatccccttgaagaaagatagattagtagaaaaacatacttgaactggagatgtcctgttcccttttgatttatgtaaaaacagcatgtgatcaaaaaatttgtaatggaaccatttagaggtcttttctatttatactccagattctataactatgggaatccaaaatcttccaaaaataattgttctcattatagaatattagtttagggaggaattttagtgagcatgaggcttgtgccctttaatttgcaagaaaggaactggagtccccaaagagctagcatgctcaaagggcctgccatcatttgtgatgcccaggagcctctccttgcccacctctgtcttagacatcacctgtcactgaagtaagctcctcagtgtcacatggtaagccagaggcacactggaaacctctccagtgtttctgctggagattcttaaataggaaattcttaaataggaccatctttactggtcagtgactttcctctactttatgaaatcctttaatccttactccccatacattaagaaaaattatgggaaggatacagctgaatgtgtacgcttgatccctttgttgtggttgatgagctgtgtgcatctgctgcactggtgactctgcagtacttccttttagcaaattgccttctgatacagatacttggaggcttgtggctgggccatgggcagatcacggtatagggtgatctgggtagactgaggattcccacttcctgttgccttctcctttcctgagcatggcatctttatttttgggtgtgcttgttgtgtgttaccttccttgaaatttagtgaaaattgttacctaccaacccagtaagcctgcatgaatcactgtgaaatccaggtttgtgtaattccagcgttttctgacagcagatgaatgatgtgaaaaatggaagagccttctgcttgtcatgttcttccttagggtaagatcctggtcgctctgggaaaagcagaattgtaagatcccctttccaatattctttatcttttggtttctatgaaaataataactcaaggaaaatgtcgtatgttcagttttatttttgacatcattaatttctttctttgtcattcttcctccttgttttgctaccaaaaatttgttgtgtttattttttcccttgaatcaaggggcctgaagacaatgggttggtttggactccccctgccatgctgggctagagaagaaccaaggggtaccacctcagccacccacaggcctcttgcaattgggcctaggcctggtccattctggagaggatgcatgatgagaagcatcagagcctgtgtagtgtgcagtctctactttgtgggcaacaggacattttctctaagaggctcaggaattttttctctcattccaccccgtgaaagccagaaactgtgggaagccacagactgacttgtcagcgggagaggcatggaaaaaacatatgtccatgcacgaatcccttactttaaacatttgtagcaaagattccaacggtaaattatgctgttggaacatagtcccttcttccaggagatgttactcttgtgcatttccaaagcaaaattgagcctttaatctgcaaatatgtactattttgtatgctgaacgttgtaatagaaaccagggatgccatggtgggtaaaataagacagatttcatccctcaagaagctctattgggagaaacaaagaaatgaaccaggagttgacacctgggtcgtgggaactcagagaaggaattttccattgtttaggcctatctacaccactgtcccttctactgttcccttctagtagcattgtaacatcaggcattaagtggaattctgctgaaatgtttcactcaaaggattttccctgttgacagcattgcttgccttaaaatagggggtcagacttttcattccagttccagaaagtgatgcgtgtatcatgattgttttgctatgaaacagttcctgtccctattaccctcgtagtcaacacaataggctatgttccttcccaggagtcattaggtttccctaatgggatgatggaaaggagggaaatagagctctggccctcttccttcattagtgctgaaatctggtgctgtatctgcttcacatcaagctcagtggattgtttttcccttgtctgagcctgctctttcctccttgagtgaggaaaaggatttaaatcctggctttcctgacatggaactttcctgcagtggctgttgcagctgaacgcattaaaaggagtacctgcaagctgtgagaagaaatattgtttgaagattagcatataatataatgtggacaagtgctcttaggtttgcttttaaatcgaaagactgtgttctgtaggatttgaaaaagaatagaatttgtcattggcacatcccacccgtcatagccccacaggtttctttgtagccactggagggtcttaagtgattctggcagtagtgaattcaggtgattgacatttgctcctgggtgtcagagttaccgtgtatctctacctactcactggttttggtctcatcttggggagctactgtgcttctagctgtcccagaaggggggaggtgggaagctcatcagtgcctaacaatgccaagttttctttgttttattcctaatgggaacttatactgccatttgtctgtttcttggcataactctttgggaaggaagaggggttaaataaaaacaaaataatgcataccttttatgaatattatctctgggctgggtgaggtggttcatgcctgtaatcctagcactttgggaggccaaggtgggaggattgcttgagcctaggcattcaagaccagcctaggcaacaaagtgagaccccatctctatttttaaaaaaattaagaaataatattatttctgaattagtcttgctgttttttaaaacttggagtcaccctattggttagataataccaaccatctattagcaaacaaacatcaagctgccctgaaatatgactgatgtggagtgttgccttgatccttcctcttttattaaggctggtttgtgggagcttggagcaggaagaagggaggtagcaaaaaggacagagaaggtgaaggagacctttaatgtgggggttggggaagcaaaaggataactaaacataagcctcttgacagcatctgtgaccgaccatgcaccaaagccatgatatggcaacagctgtgtaaaggcccaagatgtttaattcttttagcagttgttcctgtaacttcttgtggtgtatcaccccagcatagaatggggaagatgggaatagcttagatttaaaaaaaaaaaaaaaaaaaggctagcttactattcttcctctgaaaagcgttttatcacataaccaactagtttagtctaatggtggaagataatagcacaaatctaaataaattaaaagtacgaattgttaaatatttttaaaagcaggcttttacttttagatatacacaattacttggaggaaatttcaacagctgctgctaagtagaggcactgctgggccatttttaatgtagtagacaggactttaaatattgacatccattttcacaacacaaatgttcctttaggaaattctttttaataaacaaatagtaattaaaagatttaacaaatgcatgacattaattttaaatttaacaagatagccttttaaaggaatatattcccctacccagccccaaaaagcatttatgtcctgatgaccacaatgaataactgagctgaagaaacaacttgtctttgtcagggagataaaattcttctgccacgtttttaccttccattccttagcattgtgtctgtggctcttcctaatatcactttccccaggagtgggaagaccctcttacaattattggaacatttccactgtagaacctgtgacaagttaatctttttggaatggcagtcagatagctggaggtaaagccttacgtgccagatcttctactttgacacctttgctacactatatttctaaaatatccatgtacttggctgacttcttaaatgctgagcaaaatttatccttgatggctcagaattattgttatgagggtatctattactattatgtattaaaatgtacattaatgggcactaatccgagtaataattcaggaacttgcattaaaaagagttactcatgtcagtttaccatttgccctggtctttcaaaaatgcaatgagacttattcagccatatagtcccttaggaagtacctttcagttaacttcattagcacataggtcatcaaaagtcttttcctaaataattttatttgcccttcagaaaaccatctctgtttattgttcttgctgtaattactcttaattcaccagcatcattcataatgttatgaaattgtttagacctaatctcacatataactaaaggcattagctttcatatagtctgttaagttagaaagctctcacccaagattctatccttttcccccaaaataagaaaagctttttttctctgagacagtaaatttaacttatcacattaaactgccaatttagggaactcatactctcatcttctctcacctgaattctttgtgtgtgtgtgtgtgtgtgtgtgtgtgtgtgtgtgtgtgtttttcttccagctattcttgtattccttataacccatcagttctcaaactctttggtcttaagatctcttcacatttttaaaaattaagagccccaaagagcttttgtttatataggttatatctagaaatgtttactgtattagaagttaaaactgagaaatttaaaaaatgtttattaattcatttactacaataaactaatcattattaaaattatatttttataaagatattttttctacaaaaaattacttttctacaaaaaaatttagaggagtggtattgttttaatttctgacttaatataaaatatttggattcttacatctttcatgcattaagcctattgcaatatattgttttagttgaagtatataaagaaaattaagcaaatacaggtatatgcttagaaaagggagaactaccttaatagttttctcaaataattgtgatattctttgatactagatcagaattgacaaacagtaggttcttaaaagctactttcggtatgcaatctgaaatcgtatcattgaactttttgtactctgtctcactctgtcatccaggctggagtgcggtggcacaatctcggcccactgcaacctctaccacccaggttcaaggcattcttgtgcctcagcctcccaagtagctgagattacaggcgtgcgtcaccatgcccagctaatttttgtatttttaatagagatggggtttctccatgttggccaggctggtcttgaactcctgatctcaggtgatcctcccgcctcagcctcccagagtgctgtgattactgatgtgagccattgtgctgggtctggtctatctcatatatatatatttttttgaaacggagtcttgctctgtcacccaggctggagtgcagtggtgcagtcttggctcactgccacccccaccttctggattcaagtgattctcctcctgcctcagcctccccagtaactgggattacagatgtgcaccaccacacctggataatttttgtatttttagtagagacaggatttcaccatgttggccagcctggtcttgaactcctgacctagtgatccgcccgcctcagcttcccaaagtgctgggattacaggcgtgagccactgcacccagcctatcatactttcaatgaatcttttactcatgcataattttgtaaaatcctacattggtcatttggaaaatattgattcactgagtaatacaactcttccaaatgttgaatgtttcattctacaatatcagaaactcaaatttgttaatgttactactagtctcatcagaaatgtctttaagtatttgttaactggcaaactcatagtgacgactacaggctttccagaattttcattttcatttgaagtctgaattttatcaactataaatactgtcagttgtttcccttgagaagcaggttctaagaaaataaccccaagttctgaataaccattatttgtcagtcattcttttaagtaaagtgttgtttcctgaaaaaagcagtttagctcacaacataaaataactgtacaagtgatttttctcaagacaggcatcacatcacatacacagaagtattatgtgtttgcttcccattttgtcacacagaattttaaaaaggtgtgtactcagagtatggcagtgaagactataatgactcctgattcattctggcaccaatgccttggtttgtgctaaggcaccatcagtgcagatgtcaacacagtaaaaaggcaagtaacatcttaccattactatgaaaatagttttgatcacacagacaccctgaaaaggtctcctcaaggttttgcagaccgcactttgagaaccactttgtctagcccatgttgcagattcttgctcaaagtaaattaaatagctccttggtttttaaactttgtgatgtggcatacatggactttacagtctgtctctgaagattacttgtacagtcccatcagctatactttttcaccccacagtccagctgccagcctcgccagaatccccttattatttgaaatttattgttgtattcactcaatgtattctgtgcctgaaatgcatctctggagtcaacatgggtaccctttccttctttaaagcccttccctgatgtgcagtgttacctgtggtgtcctcttcgctctctcaggcctcctgttatactcttctccttccccacactggaacagacccagtggaattgcagtgtatctcatgtgcctcactaagtactgcactgggagctctgccgcctcctgccagtgactctgcttcagccatgttttcatgcacagtgacttgtcacatttctcacacatggcagacatttataatgtctgatgtgtgttgagtgtctcaaaagaaaaagggacacaggaagaacttcagcaaggttgatatctagttagttgacagttttttgttaagtattgcttcagcgagctctacataaggggatacagtatttacttcatttattattttctctccttcagggcactgacaaccttaaataggtcactttaaaaaaaataactatttcctatttacataataaatacatttgaagatttaagttttgtaagttgaggttgaaaagctgatttaatcactgtggcaggagttgcagctaaaaattaggtgaagaataggaaggtcctcattgataacccattaaaatgagtatttaggactgaaccaagagaggtgattcatctttctgtctgtatagaatttggataattgactcagtaatgaaatggaaccaatcaaaagctgctgctgctgctgctttttttttttttttaagttggagcctcgctctgttgctcaggctggagtgcaatgctgcaatctcggctcattgcaacctctgcctcccgggttcaagcaattctcctgcctcagcctcccaagtagctaggattacaggcacctgccaccactcccagctaatttttgtatttttagtagagatgaggtttcaccatgttggtcaggctgttcttgaactcctgacctcaggtgatccacccacctcggcctcccaaaatgctgggattacaggcatgaactgctgcacccagccttcaaagcttctttaggttcatcagaatgagagttagatgcatagagccattagaattcagacccaggaaaaccctacttatatgaaagaaagattaggaagatttgggaagttcttcttaacaataaaccatatgctaagctcttgaataccactgatgtttactgtaacatcttcatagggcagtcagaagagagatgttaataatctatagatggctagttggagggacaacttacatgtttcctgctcagtgctgcactaagagctcatgggtgcccctggtaataatttatgctcttaatccccatggattacctaatttcctagataaactattcccgacagtcagcgctttgcagggcttctgagccattaaacacacacatacatcccgttattttttgagaaattatcagaatgctttcatgaaacttcgtctcgaataatttaccattttgtggagaggatatttaaaagtttcactgggaacaattgtagaacattcatataaattccagagggagatatttgcacacttagaaagggtcttttgcagggacatggatggagctggaagccattatcctcagcaaactaacacaggaacagaaaaccaaacactgcatgttctcacttataagggggagctgaacaatgagaacatgtggatgcagggagggaaacaacacacactggggcctgttgtggggtgaggtgggaggtgggaaagcatcaggataaatagctgatgcattgctgggcttaatacctgggttgatggattgataggtgcagcaaacaaacatggcacatgtttacctatgtaacaaacctcccgagtcatgcacatgtagcccggaacttaaaataaaattgttttaaaaaggtactgggatataagcttataaataattgtgaacaaataatataaaaatcaatatgtatttagacatatctcaaggatggataattttatggaacccacccaaacttccatttatattttaaaaaagcattcagtcttcaagcttatcaagttgtgtactttaaatatacataactttttgtatttctgtcatgcctcaataaagtggattaaaatttttaaaacagcattaagggtagacagaatatcctccatttaatgataaatttctgatagatctcatgtatttataaggtctaactactagtaccatttgtttgtagtgggcagagtggatgccctttagtgcatatctgtgtgtcagatatttgtggtttattttacatttttaaataaaggagcttctgaatctagattttctgcactggtttgatctacttttttttttttttttttttttttttgttgagatgtagtcttgctctgtcacccaggctggagtgcagtggcatgatcttggctcactgcaacctccgcctctagggttcaaacaattctcctgcctcagcctcctgagttgttgggattacaagtacccaccaccacgcccagctgatttttgtatttttagtagagaaggggtttcaccatgttggccaggctagtcttgaacacctgacctcaggtggtccgcccacctcagcctcccaaagtgctgggattacaggcatgagccacagtgcccagcctaggtttgatttacccttgagcataggttcctttacctgaaagatccttttcagatatgcatatttatttacacagaagccatttgttgaatgctaagaaatccaaagaaacaggagatgtcttgttccacgagacttgtacaacaggcccctacttaactgtgataattgatggatgagtgctaacacagttctaatggagtcagaggcaagataggccagttttttgactgaggtgtttggtggaggcatcatgggggtgactacagttgaagagatcttaaagacttttccggttttgcctagactgggaagaacatcatggcagggtcaaggacatggaggcagccaggtgtaaaataatctgagaacagtaagttgacttgtgtgactgaagtagaagaatcttgcaaggaaaggtgagagaaaaggccagagaagtggtcatggtgcaaggcttctttcccaggatcacctctcagagctagatgctctttaccccaatgggtcacactagtatttcagccttctgggtggggattgtttcggggacattttaagttcaatccaaattaggcacttggggattggccaggaaaaatctataaatatctgtcgtttcttctttccctttgcctcagatgaagaggcttttttctttttttctttttttttttttgagacttaactcttccatctgtgttcctagttctatcttggcttttaaagaagtacttctttgtaaaacagcttcagatacttagtagttcctttattcttagtttttgaggtagctccctaccttctccagttatcagataatcagaagacttcacttttccctctgctttcctttgtcatggtacaaaatagatccagaggggatatggtagtctgattgaaaggaaaagtgttttgttctttccattctgacttgagtcagaatttaccatagttacttggttttattttatatgcacccttgtaggctgacttaaatacctccttttaaaaaataagacaaaaatgtaacatacattaattcatttattgctcacacctttttttttaaccatttgcctttatttttatccccattttgtaggtgagaaactgaggaacagaaaggttttaaaacttgcgtaaggcagcctagctccagagttcatgcttttaaccacgatgctagcttaatagagtcactaagctactcatttgtcccttcatttcctttgatgtttcctgtatgagacatctctgctagtatgtatttaagtaaaggagcattctccactctttaaacatatttttgtgataacccttccaaagcaaatgttcacagtgtaatctaaggtaaacagttacattgtactttcttaaaaatttccagaacattaaaatatgtgttctagttaagtaaaattctcaaaatacaagctccagataatagtctctgaatgaacagaagcaagtttattgctttgaatatgagtgaatgccaaaattaacctggcagtagtgttgacaaataggctttttcatgaagaacttctttcttttcccctttgctttgtttttttggacaattgataaaaagagcaagttgtacctctgcattttttggagcgcatgactgtacaatggtgtatatttgcctggagggatgagggaagtcttccatgggaagctgagtcattttttggcttgtctgactgtgtgactgtgctagagctattctttttttgaagagaaaaataagaagtcaagtaatttcctaaagtaatacatttttattttatgtgggattcatattttccttgggttgtggttattttgagcaggagtttttgtgtctggccaggagtattcttctaatacagaaactacttcagacaaaattattttctctccttgtttaataactaaatttggtcagccattggaagtcttagggttgtgattgtggtggtaaacgaagacattattagttattcatctcaccttggatgtatcataccatttttggcactctggagaaatttaagaaatggctgttgcctttaaggcaattattatttgcttagaatcagaccaacatgcagtagcaatgaacaacacagggcaggacaccatagagtcagcaaggcagagtctaagccccatagtggttcaaaggagagcgttttaaggagggttagagtaggcagagagagctgaattgggaaagtagaattaaaggatggactttgactaaggtggataggcgagagagggaattccagaaaccatgattgttctgagagccgggggccttgaagtaggaagaaccatattctgattgtggaaccttgatacacaattaggctttatcttgaagaacaatagaaaatgagattggttaagggtcatggagtagtctgaaatccagacaagggagattagactggatgaagctaaagacttttgtactgcctttctgaatgacagcctaagtcatatcacttctttgttcaaacatcttcactggctccctattgcccctgaatagagtcttaaactctttagcataacacatacacttttttcatttttaattgacacatagttgtacgtatttatggagtacagtgtgatattttggtacatgtatacaatgtgtaatgatcaaattaggataattagcatatctgtcacctcaaacgttaattatttcttaatgatgaaaacattcaaaatcctctcttcccgctagtttgaaatatacaatatattattgctaactatagtcacccttcggtgtgatggaatactacatttgttcctcttatgactctttacccattgaccaacctctccccattctcttctccccatccttgtcccagcctctagtaaccactgttgtactctttatttctgtgaaatcaacttatttagattccacattatcagtgagatcttatggtggttgtctttctgtgcttggtttatttcatttaacgtagtgtcctctaggctcatccatcttgccataaataacaggatttcattattttttacagctgaataatattctgttgtgtatatgtaccacattttctttatccattcatctgtcgatggacacttaacttggttctgtaccttggctattgcaaacagtatactaaacatgagagtgaatactgatttcctgtcctttggatatatacccagtagtgggattcctagatcatacggtggttttcttcttgcatcatctgtttgtataacctatgctgttaatgcttttcctacctgatgtcatagcagtcccttgcatgaatctgatgcatgtaaccagacattgtgctattcctctgtcatacctggcattcattaacatctttaccttcactcacactcttcatatgcaacacccacctcctctcttccattttctctgtttccttccgtttattttaaaacagcatcttttctttcttatcacttcagccagagatcctcttccttttgctgaaattctgcttttcatctgtactacctacccaagctgtcttgtgtttgtgtttcatacagttgctcctgctgtattttctttgaggactcaaaaatgttttatgtatttgtatatctctcataacaccttacagggcaactcacctaaaacagacacttaaatatttgctgaatgggtaaagaaatttggctaatattcattagtttgctactaattgaccgtggcatgctgatgacaacgagatcccattacagaattatggtcagtaaatgtcagcattgtttccttttacctcattgcctttgttttttatggaatgaagtttgttcttatttccatagatgatcatatggaaaaggagtttctcacttgttgcctcttcccttctttttccatttcctttccaaaacacttgtccaccctgcctctctccttcagctatatgaaacctttgttcatattcctgaccaagacagcagtacgtgtattcaagtgttctattttggtttctatggcaggatctctttgacacaatcaaaagtatacaaaaggatagtcgtgatgcatggaactcacttcttggtaatggtccctttttctctgtcagtgttttgttttcttcttaaagttcttaacaatctaaattatttattgtcaggttagtaatcttatagcaaccattatataaggattcacttaaggcattttctctaaaggaaaaaaatgtcttaagagaaaactctgaagagttagtatacagatagagcttaagggccgggcgtggtggctcaggcctgtaatcccagcacttcgggaggccgaggtgggtggatcacctgaggtcaggagatcaagaccagcctggctaacatggtgaaactcccccgtctctactaaaaataaaaaaattagccgggcgtggtggcaggcgcttgtaatcccagctacttgggaggctgaggcaggagaatcactagaacccgggaggcagaggttgcagtgagtcgacatcgcgccactgcgctccagcctgggcaacaagagcgaaactccacccccccactcccctcccccaaaaaaccttaagttttcccctgtgaaatagtagaatatttaaatccagttttcatcagtctacaactacgccagaactaccctcaccaagatctatgaaatatttgcctagcaaaatccggatcttgtatttgcatgacgtttttacagcatttcgcactgtttactatcctttctttgaaatactttctccatttagtttccttgatgccacttctgtgtgttaattcccaaatctgaatgcccaacctcagccattcccctgagttccagtcacacactttcaactgcctaccatggctctgctcagatatctctgagataccatgtctcagattcactgtgtctaaaagtgaattcatcatctgatctctcccctgccacctacttctgctgcattccgccctttacctagttgttcaggacagaaacctagtccatcgtcacacttcttttacttctgctcccaccccaatgcccaatatcctgttaatgttaaatatttttggactctcggtttcttttcttgagctctgctttcagcagctgagttcacactgccatcatttctcacctgacttctctaacagctttctgactcatctgtctctaagcttgctcccttctgtcttttgagcgtattccagaaaaatatatttttgaaatacagatgcgatcctgcctttcccttgctaacaactcttcgattgcttttcctattgtagcgacaatacacttgtgaacacaagtaacatgttcagctggggctggcctcatcctttgtctctgtgctctttcttccctctgggccttatgcagtcttctgcctgaacgtagacacaggtcagtctctctagctttccttgcctgcctccctacagcaccatccacacatatacaccctttgcctggttaattcctattaagtcttccatcaagtctcagattagtaatatactgtaagggccagtctcaaacatgattgtaattatttaatatccattttgttcactgccgtatcctcgatgccaagcgtacatgtttaataaatagttgcctaatgattaaactttactgaaaagcttattgaagatttagggcagtgacatggagttgtactatacagtcccaataatgtcacagattttccatgtgaaatttcctggttgttgttgaaattgttagttactctatttgccatgtttagtgttcttggccctcaggttttaaaagttctaatgtatcttaaaaacatgttaggaaaatttgacaatacatgaaacatttattatgctttgaataggtgcagtttattatgtgtaaattatactttagtaaacctgtttaaaaattacctcataataaatacttttcaagatctagattaccatctgaaatagattttttttactggtggttttgtctgaatcacatacgcattttgcacttgtatatataccaactatttgggtgggaaaaatagcataaggttgtgaattcatttgaattgactatttgatggtatagttatcatgtttaagtagatcaagcgtggtggctcacacctgtaaatcccagcagtttgggaggccgaggcgggtggatcatttgaggtcaggagttcaagaccagccaggtcaacatggtgaaacaccgtctctactaaaaatacaagaattagctgggtagtagtgacacgtgcctataatccccagatactcaggaggctgaggcaggagaatcacttgagcctgggaggcgaaggttgtggtgagccaagattgtaccactgcactccagtctgggcaacagagtgagaccctgtctcacaaaaaaaaaagaaaaaaagaaagaaaaagtaaatgtggagagaacatattcttcttaccttaatgccttaaaagggatgctattatttatagtaattttactcaaaaatttgcacttacgggcttcatgaaattggtaagatttctacatgtgagaagaagttcttgtgtcattgtactattatgaagtagcttttgtttttgtttttgtcagtgctggactgtcttatgttcttgtggtcatgctaaaaagaaatgttgttagaagattcaaaactatgagtaaatatggcttatagttttatcaaatacaacagtctttaggatctggttttaaatagacaacataaatggttatcaaacagtacactgcatgagtagtgtctcatttcccttttggatagcattatttgataggttgaataggagaatgccatacatttagtatgtattaatttcaggaagaagttttattaattattctgtattgtatagaagatggaggtatgggactcagaattcagttggctttgtagctgatagaccagcattttacttaatcttaggagtgctggggccgggtgcggtggctcacgcctgtaatcccagcactttgggagtccaaggcgggtggatcacgaggtcaggagatcgagaccatcctggctaacacggtgaaaccccgtctctactaaaaatgtagaaaattagctgggcgtggtggcgggcgcctgtagtcccagctactcaggaggctgaggcaggagaatggcatgaaccccggaggcggagcttgcagtgagccgagatctcaccactgcactccagcctgggcaacagagccagactccgtctaaaaaaaaaaaaatatatatatatatatatatattaggagtgctgattgatggacagatgtcctaccaggggaggcttttagtgatttaattctgggttccatcattagccttgctcttcagatttatgaatgatacagagtttggagaaacagctgttacttcagtgatggaatttaggttcactatactctcttaaggctaaaatgataactttaaaacaaatgagaatttatttgagagaatatatctatacagaaagctataaagtaggttttaaaacaaaatcacaagattatagtttaaaggagacctgatactgtaagtcacactgaaagaaaatatatgggaagtaagtttatttcacaataaacttattcttctagcggtgtaatatgtgtgtcaagaaaaccaatttgatcttagttatcccagtgtgcaccatgtcagaggattttgtttggggcatccacatcacaagaagtacactaactagagagcactcaggtattctgttgtctgaggagccgttgtgggaatcatgattcgaaagagaagcctgaagagggtggtgaagcacgacggccatctttaaatatctgaaatgctgccaaaagaaataatgaatgtttgctccaaagagaaaagccagatcagtgtatctgttcattttcaggaagacttgggtagcaatatccagagatcttttagtctgtatgtttggtttgttcattctatttttgtaagatattactatagagagaaacttttaaaaagtggaatgtcaaatattgaaatgttggcagagaagttgagtccgtttaatgtaaaattaagaatcacttggcatttttattttttaaaaaacatctttttctgtcctttagcatttatgtaaaatcaaatgtagggatattgattatgagtaatgaatcccaagttttctttcctcaaatactaacttttctctgttatagtttcatttcttgggggatttatcaagtggcaaaattagatgtagtggaaagactgatttacacaactgagtttaaagcaaatctgttttattagctgtgtgatgttatataactgacttaaattctaagtgctacttttcctcatctgtaaaatagacagtaaaatttcaccttacaggtttttatgaggaatcaatgaaattgtacctgtggaagcacctggcaaacaggaggtattcagtaaatgttgtggttaataaatcttgctccagaagacttgtcctcaagattaaactatcctgtcactttttcccaactgaaattttgattctgccatctccctttcttccttcctccctccttttatttcacaaagctgttggtaattttagtagaatttaacatttgtgtgtatgatccatgagaccttgttcctgtaaagagcacaagtttacgaagatacttttttcttatattgttccatattagtttgttgttattttaattgttgctattattgtcagttagctgctgccagttaaattgtcttaagttttcttcttgcaaagatagtaaagggttaaggaaaggagctgttggctactgcttgctactaatttgaaaagaaatggtggttatagccttctaggtctctccttctcctttacccttttactgtcttgtaatcttcaaatctgtatgttagtgaatgctaggagggaacagtagacctgcttctcctggagccatagtacaaggaaagcctaattggagacgatcctttgcagccattgtaaagtattttcttctttcacctctcaaatattcatttgtcttatttgaagcagtctattatctaagcagacaggagttgctcaagtggaggctaaatgttttatctgtattctaatacattttaccaccaacatatgtgtaactctggatggatcactatatttaagtttagattaatgaaaattgttgactgtggtaaacttttccttccttcccatttcatgtgaagaacaaaggtagaaagtgtcattatgcaggaataatgttttctgcaagttttaagagaatgtctcaattcctttttctttctcctctgaaactaccgtatcccatgaactatatggcatgtgataacttcctagtctcagactggcagtatataatattagagcaagaaggatcttcagatatgacctagcgttgaatctctaatttttccattctggaaatcttggtccagagggtcaaactagtatctcccaagttgctcagtgagataatggcacacctaggaagacaaagaacccttgattttcacttagtaccttgtgttctctgcagagagtaaaattgatcattgatgagtcattaaccagtgtccattcacatgctgctactttatgttcactttggggtttcaggaaaaaatacatagtagcagaagatgagccctacccctatccccacacccccacaaaaatattcactggcctttggtgttctgtttgggtcttcagcatcccccactaggtggtgtcctaattcagaaactttgctgtgagactccagatgggcttctgccctaactggaactaaagcagccacagtgttgacccataagaatgcttaaacaatttggtaaggtgctagatcttgtagttaagtaaatcaaatgaaaatttaattcatgaacacaaatgctatagctaaattaagatgtataaaatatttttatatttcattttctggaatctttaataattgcatgttggccctgtggcatgagacagattaaaagcactggttgtttttaaagaatctgggaccatttgtgtggatagagggcaggatggaggctgcagaaagaaaggaaagacaattaatactgtaagtaactactgttaagtagtatggctgtaaataataaaatattttactacaggttccccaaattaaaagaaaagggaaataaactcagaacctcctttaaatttgtaactctcagctctggtttagatatgaaatgattggttgctgtatttcaaaatcctggcagaattactgttcaatggttccagatgtttttgataaaaacttggaattgtcacatcaactgcaaaagcacaagactgcagattctgtcttctgttggggagtgctgagcagatccagaggggaaagcaacacagactcttttttccacccagagcatttgtttcccacccagggtatttgtcctccaacaaggaacagaatatgtaaggaattgtcctttaatatgcagaaagagcaggaaatctagctttccagcctgtggcacaaagccagaagttagaaataaaaaggttagtctttatgtctcaaacagtaatctaggctctttcagaaaattatattattttgaaacaagtttctctctcctaaaaacttcctgaagacagacaccttgttacctatttattttgcttgcctccactagaagtcacaaaatatctgttacattgttataaattatctgcatgtaagtcactggacagggatagggtagaaaagcttttttgttgttgttgttgtttttgttttttgttttttgaggcggagtcttgctctgttgccaggctcgagtgcagtggcgcgatcttggctcactgcaacctccgcctccgaggttcaaacgattctcctgcctcagcctcctgaatagttgggactacaggcatgtgccaacatgcctggctaatttttgtatttttagtagagatgggggtttcgccatgttggccacgatctggatctcttgacctcatgatctgcttgccttggcctcccaaagtgttgggattacaggcgtgagccaccgcgcccagccggtaggagggttttaatggtgattaaaccatctctgatccctagagagacagatgcctgggaaccttggaagcaggaatcatttgattctaattaaaacagaagggagtggcagtgaggaacaaaccatattgaggacagaggggaggcagctctgtgttcaaaaaaagaagaagggcgagttctacattctagcttggtgaaagcttttacagaaaagataataaagtatcagtttatctatacattcaagcctaaaggctctttctgtctgtgccctagaccacatagtttggaagtatttgtaaatctctggtcaagttcccatgcttttgataagcctgagcaagaattttatttacaacttttaaatctctgtcaaatcgtcttgtttctactgttttgtagcctcatttgtaatgaaaagcaacatctgtttcactgcacatgttggtaccactacagagccaaggctcacttggggcacgagaaggggaggggttgtccgccttcattcctcggatgaaccagtgaggaatagggagataaaaccttatggcttttatttcagaataaagcctgtatgtagctggggtgtattaatagaaagttgaggaagacgtttacagtcttcttagcagggtttgctgtatttccctcctttaagctggtcagcaacttgaatatctggcctgaggacacagcaactcatctataccctttttctatatccgttttttagctcctgaaaaaccttttcaccaactttgtttgcaatgtcaacagaaatgtaggtgttaaatctctcctctccccttctgttgtggtatttgagccactgctttcacagcctagctaaggactactctggacaactcaaggaaaatgtcagcagctcctagaaagagaaatccttttttttttttaatccctttttcttttgtttcttcactcctttctgctttttgcttccctcagttcctcatccttttccctcccaaatcattcatgatccaagtaagagaatgtctcaggtgagagaatgcattctgaagtaagtctgtccctgagaatgttagatagagtggggggctagaagggtctggaatagtaagaaaacaggcaaatgaagtagcagacccacaattcaagacccagttagtgtgcatagaaacactgaagaagtcccagccaggcagctatacttagtcgcaacaaatattaacatacacagaactcctttgttccactccttttctttttcattttctttaaatcaactccatcatcccttctccctccccaaaaataaagcttaactcttgataatttttaaactttatcagacacatttatagccacgtctcgatcctagagacataactgcaatatttggctgacatttttctcgtgttaaatcattgctttgcatttggcagggaggtatagtgtatgctttgggtagtttcaattttctgtacctcacgacaagtccattgtacacgcttgtggtgtttagtataacaccccccttcctttattagcatactactctgacatcaaagaactgagctgcatcttgcaatgcctgacagagcctttttcataggggtgggaggaggaggaggaggaagaagaagcgggttggaaaaggaagccttgtttttctcttcgtctcggtagatgaatcatgttcccacaactgcaattgggttttcaaacctccaaggctgcgggtgcggagctgaaagggcaagcagtgacgttcttgagagagaaggaaaaagggaggaggaggctggctagggagggaaggagggagggagggagtacagcaggagtggtcttttatttttttcccttttactctgctgtccttagagattttcaacttaaatcaaaaccaagccctactgcctggtgagcaagagagattccaaagactttactttgaaaagcatctcccagcttctacttttttttaaggaaaagtagattttctttgtctttgtttttgttttaagcaagaacagaatctaatgacttttttcatgccatcgctttgaaatagcgtcgtcttcctttctttctctccctcttcctggcaaagtatatactggatttttattgccttcttgggtttttttccctacgtgtatcggccgttatgcttagccagtttattctttatttttttactggagtcattgccagtgatggaaacggtgtttgcttctctttcagtcaagatctgcacaaagtatagcattaggtggtatttattgtttatattatgagttctacattcatctttccagcactctgaagttatcagcaagttctcagtcagttcaaggcattggattctgcttgatttctttttaattcattgtttttgacccctttgagagttttaatagagaggagtctggaaggcagagatctccaccacctaaccgtgagaaatttggaactaaggacttgcactggtccccaagttaacagtggatatacttcctgcattttctctgttctttcttgcatttgggcaaaatgtatgaacggcacaagaggcgctacagcctctgtgacatctccaaggtggacaggactgtggacgtggtattgctgaaggtaaggggggctgcacctcatgcattctgaagctctgcaggctgttttagcgctttgaacccggtagccatgtccctggccctcctgtattgggagaaaggccgagaaatctgtgcacagtggaggatgaggggtgaatgtaagcctcttaaaggaatatctgaacaggaagcaataggtgcttggtaatcagcattggaccacttactgttgaaatgtaattttactttcattaaaatggattcttatgcttgggagaacctcatactgttgaaaatcacagagagagaaattcaccttccaagttgctctgtttgtccttctgtctctgtcacccctccgcccccagactccacccccatctgcctggtctctttctctgtcagtctctctgcctctgtcttttaagtatttctgtcttttgtctgagtcttttctgtttttctgctactgtctcgttcaattctttaggggaaggataggcaacatttatttcttttggaaggatttccaataaacctatctattaaggtggcagagctgaccttttggcttggtttgactgcttttcagaggtagcttctgactttgttgatagctgtatttgtttgtgttctccgcattagtgatgtttggtgtctaagcaggatgagggcggagactctgaatagctaattgctcacagaaggcatccttgaatctaaaattagtaagaactcctccagccggtaagatgagagtctgggaatgttggacagctcaaagagcactttttggaaatttagcaattttctggcaaaggcaggggaaattggaagtcaaccaagcatttcatagatgacagaaagaacctcagtaactgaacttgtgagggtgtatgtggaggtgagggtcattttaagcaaagtggaaatatattgccttggtcaaggaaatagtggacctattttattgatttatcaattcagtttattacttgggtcttttcgatttttttctttggtcaagtgaggctaaggaatgggctcagaaggctagacacaaaaaccaatgaaatgccatgttgggcagggcactaggtagaggcgttgtgatttgtggtagagtgttgtcattgtctctccataatcactgtcaggtggttgacttgctgggcctcggctgccagcagttggtaacttggtgttttgaaattgttccaagatattattcattttggtttctcagaaatgtgattttctctgtgagatcacggtgatgttttaaaatttttgtcctcatataatgtatttaggagaatctcatttttaggatctttatgtccatgataccctatgattttgcctgcgggtggggagaaggataaaaagaaaatctgagtatcacaagaaatattgaacatttaaaataatgctaaaatatataatactttatactctaggtgggcatggaaagcccttgtgaatggagctaaatcagtacaggcttattggcctcagagttgctgttttatagttttaatgaagcacttccatatacgttacttaatttgagacttgccaggcagttactttttaccccatattcatatgaagagcccgagggttttctcgagcatggtaaggggtatgaagaatttgagtgacaagaatgtggttttttgtttttttgttttccccacaaacctacagctaataaaggtgtttgtctttgtgtatttgtactatcctgcccaataaataataaaagattttcagtggagaaaacttcacttctcagaaaatagtcattagtaaataaacactaggagtcctgaaaacaccctgtttccagtttgaaataagatggggacgtttggtgttagtttctttgctttggagatggagaagaccacatctttgagaactataaactcaaagaaacctaagtacctatcccatgcgagccacgggttacagtctttatcccattattgcttaaaggtagacaataaatagagaaataaataagtacaaactgttataattgatttgaaagaaatgagtagggtgctgtgtagggaataatgggcagaactatttcagatagaatggtctttagacagaagatcttttcgaggtgcagacatttaaaaagctgatctccagaggatggaaagacactagctatgctaaggaagagctctctagaaagaatgaacagtgaatacagggccctgaggaaggaaggaatggacagggccattgtggtggatgggagcaccttgagtggaaagtggggtagcaggatgagaaggccggagccagaggtgggacctggaagagcagggccttaacagctatggggaggatgccttacctctcagtgtacgtgttgaaaagattattctggtagtaatcggttagcctgccgttatgatagcacaggcaggataagaggattttgtggtctgaagtgggaagaagtgaatggatatgagacacaggcatatagtgtttacattcctactctttgtctcattttacgtacaggaaaacagattggtgtagttaataactttcccagtgtctcacatctcatatgtaattgataatagagtgcagtcccaggttggactgttttcaaagtccatgtttttcctgctattctagacctcttttttgagtcgataaattcctcttattacatgaatatgtatattagcttttattgatataagcgtatgtgttctttttctatcttagacttttgttctcttctttctcagtgcaggaattccttctacaatacttaggataggtacaccatgtcatataagttcattttgtcccatgatttttagcaaagttttctcacaattctaaaaaaccatttggtagtgttctccaattatttctacaaaattatttctaatttcagtattttctatcagtgttttaaaaactatagttgggtgcctgtgccacataaattctcaagccgtcatgtgcactttctccacttttatctgtggaaatttgcttttttgtactaaggagtttgtcatttttatctgttcattaatattatctaaacactcaaaacaacgtttgttggttaaatgaatttatctttgtaagtatggattcataagcatcatgttatataaattgtgtttaacagatgaggtgaaatatggcagtaattacagagtttaaattgtgagcctgtcactttggtattccacatttaacaactccaatccctcccattgacatcctaataattcactgtagattagcttcagcattctcattctgtgttatatacccacgctttatttggctgcttctgcattctgccctgcttcctttgttagttctgcatagtttcacggtagcttttctgtatcaagaccttcttgtaagatttccctgaggctgggtacgctagtgtcatcctcacatcagctcttctgtcccatcatcaacccccaatgcctctgaaatattacctctattctgaactttttctaagtaataaaacctaagttgatagtattccttggtcacccacctgtctgttctccagcgtaacatacacatacccattcctgttcctctgtatatgacattcccccagttctccttttcttgatgcatgcacttctgactcttacagtatgtggttggtaactatgaatcatatgctaaaaatgggatatgaaagaattgtaattgttggcatgggccctttggtaccaatatgcccattttcctcagcatccttcaaaaagctagtgttgacctcggaagttggtaactgatgggagctttcacctaactgagttcagtagccaactttagctcatggtgagcattactagaggacagcaggtatcagaaactgactgtaaaattagtgtaccaaaaggaagcaggtcagaatcaaggattaactgctgatttgcactgcttttagcctgggccattgctgttttactaattttataactttgggtacctggaaaaatactgcctgttaatagtaatgtgattcttcttgttactgatgatttatagagagtattttataggcagtaattcagaacattaattagctgaatggttaaaagatttgcaactgtgttttgtttacattgaatgaaaatatttacagagcaggacgattcccccccgactcacgacacttgggcaggccacacgagctcattggctaaggctgaggaggaatagtctgtctctaattatggtgtcattttgcagagaaacacacattccctaaaagtttgcttactgtaagagatgtccgcattgcaacaaaacaaaagacataaggaggctctggattgaagacaaccacatatatagccactcagatactgtccaattccctgaaaagactttgactcaagtgttggcttctatgtccggatggtgggtttttgcttccttttgttcagccttgtagctcaggcaggatctcctgagacagttgcagaggaagtaaatatggttagtggctgggaaggctgggtgtaaccatgagctgtattattaggatgttcagatacgaacagtaacagaaacactgccagaaacaaagacaattccctctccactgaaaatatgtacagctctatttctgactgatgggaacacattgtgggtgtggtttagggataatcacaaggggtccataggcttcatgtcagaaatttcagagtaacctggataggtctggcatttcttctgaggtaacttccattatcccatatttcatgtgcaccataattcaccagaagtttggatgttgaatacctgcggtgtccatgaactggttgtcatggagataatatggacaaaggaaaaccaatgactatgttttgtagctaaagtgtcataaatgtgattagagccaaaatgtatgttttggtgacttgtctctctaaaagatgtagatgtttaatggtaaaatctctgttttccacatttccagctacttgcttctctacatcacccattcactttcctacccatttagtcagttgccagtcctatactttgttcacagctgaagattccaaaagggtaaatctgaatagaaagatacataatcatcttcatttttctctttaaactcaaattatttgcattgccaacactgatgattttttcctatcccgtctcctaattctgctgatgatcagaatcttttgccaagcctagtctcagaactgactgagaagagtgttgatagtataaggatccaatttatctgttagcgtgaaaacctcagtctttgaatcacgtttggaaaagagactaacatgagaacaggatccctttaatgaaaaaaatgtctggtggcttttgatttcctgcagtgtatgtttcagatgtggccaggcacagtggctcacatcacgcctgtaaccccagcactttgggagattgagacaagaggatcacttgaggccaggagttcaagaccagcctgagcatcctagcaagacccccatcgcttaaaaaacgaagtttcagatgtctttccatgtatgtactcagggcctggcattgtatctggcctgtaggaagcactctgacagtgtttcaaatggagccacatagtgtggcgtttaagttgccttggttgtttgagtgagaaagaaatagtggagttgttgatgaatagaaccaagactagaacaaatgtatctgccacatcaatgattctgaaatagggcagaaggaggggggagatgttttgtaatcaactttacatctcttaagcagcttactttatagtaagcacaatattcttcacacatgaatatgatacgcttggtggtattgctgtttcacaggatgtggttgaaaatgctgatacatgttttgacattctttccacacacagtacatatggagcttgtcctctggttaatgacattgaccatgattggtagtgtctggcccagattactggctctgactctaactgtgtgggctgcctgactacttttctctaaacaagcttgcatatctctaactgctgctcattcatttcttaattgtgataaaaggtacataccataaattttaaccatttttaggtatatagttcagtggcattaagtacattcacattgttatataaccatcccaccagctgtctctccagaactttttcatattcccaaactggaattctttacctgttaaaacactaacttcccattctctttgcttgctagtttggcaactaccgttctattttctgtctctatgaatttgactgctctaggtactaagtggagtcatacaacatttgtccttttgtgactgtcttatttcacttagcataatatcttcaaggttcatccatattatagcatgtgtcagaatttcctttctaaggcaaactaatattcaattgtaagtatataccatattttgtttacccattcatccatcaattgacattgggctgttgcccccatttggctgttgcaaataatgctgttatgagcattggtatacaaatatctgtttgagttcctgcttgcagttctttgcatgtatacccagaagtggaattgctggatcataaggtaattgtatgtttaatttttttttttttgagaaactgtcatactgttttccgcagtgcctgcaccattttacattcccaccagcaatgaacaagaattccaatttcaacacatcctcgccaacacttattttctatctttttttgtttaaatgatggctgtcctgttggatatgaagtgttatttcattgtggttttgatttgcatttccctaatgcacacttacttttgtcctgtttgtgtttgtaagaagccagcaagtatgagctttccaaaccaccccatctgcgaataggtattatttactatgaatgccacctttagtgtgtcttttctttttgcaagctctgcctttgctctcctgcttgctcttttcgtctgttatctcaagaacaaatgaagctagcgccagcctttctctcaagcttccgaaaccttgtgtaaccatttgcaggacatattgttatttcaaactcaacatgggcaaatggagtacatcatcttcttccctctagatttcctatttctgttcattgtggatctttgacctgtttttctctcttacttctgtgaattttgccctttgtactagctctctgatgtataccttttatgtgcttcccagtccaggtatacactacctctagactagactagttcaggctcatcctaattggcttttgtgtctcagatactgtgtgtttccttcctccctactctcccattgtatctgtacacatctagagttattggccaagtatagtactgatctttttactacctttcttatatgattgacagggtccacccttgttagagaacaaagcctagattcattgtagctgtatctcctgttgttcttccttgctcagtttacatttctggatactgttgggctttttgtgttcctgaaaaacatcaaaagcaaaggtctttagcctgggttatgaggttatgcaaagaaccgccgattgtgacgtagtgtgcacgttcctggtgagggttccatggcttcctgcagattcttgaaggagtctgtgacgtgaaaggctatgaagtccagctctggagtgtcctaactgctttgctcatgcttttttcgtatagctagaattccctgccttaccatctttctcttgcaagcatattgtccgcttttaaagcctacctcatataccaacgcttttgttgagcttttcccagattcttgagcaggaattattttcatgctggggactttcttttgtggattttagctatttgtgtacctattgtattacacaaattaatcagtgtttccaaacttataggccatggtttgtggagctgtctcactgaatctgataatccgtagactcataaggatgtatgtatatatctatcatcttgggatgtcaagccttcgtaacccaaggcattttgtgttaaaattatacttataaaccgtggtagctactatgccaattgtaatcagaatcatctttttcaccttcttgtctattgctgtaccttaacctggtttcttgcctaaagtgagcactccataagtgctgctggctagttgtgtggatgagtgtcagtgtgtagctgacagcaagatagtgttaagaagccgccttctgctagatttcccaatcctggtgcagaagccccgaattatcggaaatgttactgttcttcagtatgggttttacttttaaatgtttacgaatgaagcctaattcagaagagagaacctgcccgaaagtgtgcatcatctcagatctgcttgagcttcttgtgttcttagagacagtgagcctcctcaggacatcattgttaattaactgctggtgattaaaaccacaggattctagtaattgacagagccaacaacaaacaaacagcagtttttttttcagttacagcattttgatatttaaaaaaattggtatccagtttcatattttacttgtgtcatttcagtaatgccttattttctaaatatttttgtctaaatcaacaatgactgttttccaataaatctttcttgaagatgtgaaatacactttgccaaacttattcaatttaatactaaaaaattgtaaacaattattattgaattctaagacaaatataagaataagaagagatggcacagtggctcgcggctgcaatcctaatgctttgggaagccgaggtgggaggattgcttgaggcttggagttcaagaccagcctaagcaacattgtgagacccctgcctctccaaaaaaatttttaaaaaacaactgggcatggtggcacatgcctgtagtcctagctacccaggaggctgagacaggaagattgcttgagcccaggagtttgaggctgcagtgaggtatgattgcaccactgtactccagcctggggtgacagcttcttcttctgaaaaggaaggaagtgagggaaggagggaaaatgaaaggagaaagaagaaaaagggaaaagaacaagaagagactcttgagggggaaatttgtggtggactggaagtgaggaaaccttgggtcctctgttttgaaatatttattactttcatcaaattactttgcctcctttggcctcaggttttttatgggtctagtaaagggaagcagggctgtaatcctcagggagtctctccacttttttcttcagaatcactgaggataatgaattcaaagattattcattaggcatccaccatgaaccatgcacttactactcattggggagatccgttaaatagatgcgattttgttctctggaagcttatggtcttttgagcagataaagctataaatacaatatagttcatctacatgtatgctctccacaaatcaccaagcctcactgagtgtgttttcttcctctctaaaatggcaacatgccttctcaggggtatgtaaaaaggtcaaatctatgggatggtactttaaagtatcatgaatctagaaatataatgagttcctttacagcctttttttttttttttttttttttttttttttttgagacagtgtctggctgtgtcacccaggctggagtgcagcagtgctgtcttggctcactgaaacctccacctcccgggctcaagccagcctcccacctcagcctcctgagtagctgggattacaggcgcccacaaccatgtccagctaatttttgtattttttgtggagacagggtttttccatgttgcccaggctggtcttgaactcctgagctcacagttgccaaattcagtaacttctttttgttttgtatctgctttgacttctctgcagcagcttctgtgaagctctaatctcccgagttctctggctcttagacactggtgtgtgccatctctgacttctctattctctgttttttaacacatacacacacacacacacacacacacacacacacacacacacacatcatgaactaagatggaaaattgtaacacacacacacacacacacacacacacacacaaacacaatgaactaagatggaaaattgtaattccggcccagtgtctctgtatatataacatttgtgacccaaccagaaatatacgtagcacgaaaatactctatgcaatgtggtgttccattcactgtcattcccatctctattaattacagcatgcattgtccaagtgaacacacatttcattgtctactatgcaagatgctatggtaggcttattgaccgacctaacattttcacatctcacatgtaagctgtgagttctttgaggacaagctattttactacttctgcttttaaggcttggttggtacagtgtttattatatagaagatacttaacacagtttttaaaaaatagaaggatagaaacatcccagcatggcgagccttacatcttcacacaatcttccttttctagaaagtaacaatagattttaaaatagatttttccattaaaaaaaagaaactcaggatgagcacccatgtcacacctactgtggtagctacaataagaaagataacaaaaataggtgttgacaagaatgtagaaaaattgttgaatggtacagccactttggaaaacagtctgacatctccttaaagtattaaacataaagttaccatgtatgtaacccagcagttccagtcctaggcgtatgcccaggagaattgaaaacatgtccacacaaaaactctgaatgttcatagcagcatcattcgtcacagtcagaaagtgaaaaaaaaaacaaccacccagatttccatcaactgatgcatatagataagtaaaatgtggatatatccatacagtagaatattatttggaaataaaagaagtaaagtactgttacatgcttcaacatgggtgaacctcaaaaacattttgctaagtgaaagaacccagcatgaaagaccaaataatgtgtgactctatttgtatgaaatgtcctgagtaagcaaatttgtagagatagaaatacattcgtggctctctaggcactaggggacaggggatgggggtgaggcatgactactaatggatatagggtttctttttgtcaagataaaaatgtttaaaattacatagtggtgatggttacacaactctatgaatatactagtactattgaattatatacgttaaatgggccagttttctagtatgtgaattacatctcaataaggatgttaaaatgcaaaataacacacacacactttctctctctctctctctctcacacacacacacacacacacacacacacacacacacacacacacacacactaaatgcaatgtggtgatttggatgggatcctggaacagaaagagaacactaatgggaaaacaagtgaaatccaaataaagtccggagtttacttaatagtaatgtaccagtgttggtttcttagtattgacaactgtgttatggttatgtaagatgttaacgttggagaaaccagtgaggaagggagtggggataaacgggaactttctgtgctgtctttgcaaactaaagttatttctactttttatgtatactattttttgtatcagcctgaagttgttacaaaataagtttatcaagataaattttttaaaaataaaagaaatatataaccattgaagaaaatttgggaaactacaggaaagttaaaaggaatataagttgtctctttgtggtcgttcagacatatccacccaattgaaaatagattaggagattgcaccacagaagtgtaacatgtcaagagatttttggctgccactgtgtgtaaaatttttaatactatataatatatactaattgttaatgtggtggatcggaaattgttccgtacttgcaagctggcaagttaacttacatcctgacacagtttcatgggtgctggctgaagtcatggcattctagggtcagagacaggtaaatgtattactcattgcatagccagcagcatcagcatcaccttctcgttggttctccttgcttcctaagccctatgcaggcaacacgaaggggtccaggttgatgctgtgtcacagctgagaaatctaaacctgaagaaatctgaatttttatacagtggacagtaagcctgtgtgacctttgcccttgactgagacattatctttataatactggacagaaacaaacctgccctttgcttcggaaggaaacagtatttttatcttctaagggtgtttgatatacaaacagtcttgaaaagatagtctagaataaaaggaccatcagggcttttgctgataaaacctgcagaaatgcaagagggacatggagaattgttttccaacatgattatgttctcatcactgttattatgttctcatcactgttactcagaaattagcatatttacttaaagatatgtaactttaattttgttctagtagtatgtgtttattgtatataattttgtaaaatatgaaactcactttatgtaacacatgtacctaaaatgacaggaaaagtatagagagtcttagttgcttgcatattcaaggcaaataatgttcactttactcattggctgtggaatgacatgtggtattgagaaggtaatgaaaagtattctaagaaataaaatttttttttttttgaggcggaatcttgctctgtcgctaggctggagtgctgtggcgtgatcttggctcactgcaacctctgactccatggttcaagcgattctcctgtctcagcctcccaagtagctgggactacaggcatgtgccaccacgcccagataatttttgtattttttcagtagagacagggtttcactatgttggccaggatgatctcgaactcctaaccttgtgatccgcctgcctcggcctcccaaagtgctgggattacaggcatgtgccaccgcgcccggcagaaatagaattttaatagggttttctaaactgttggccccttgttgaaggtcaaggtaagagacagtaatatggtaattcgtagtagttcatttccacattctttacttatcactaaagaatcatctgagctcttttatttctgtaaactaaacttgttgctgtattcatgcagcctcttcttattacaggaataataggggcggggggggagtaattttttcccttccagcttaaaagtgtagttttgtattgcagtacagtggttctattagcagagaatcttatttcacagtaagtaaaatttggctcattgcaaatgaaatgccatttgaaattaagagaaaattctctgaatgactttttttttcttttttttttttttttttttttttttgagacggagtctctctttgtcacccaggctggagtgcagtggcacaatctcggcttactgcaagctgagcctcccgggttcacgccattctcctgcctcagcctcccgagtagctgggactacaggcgcccgccaccacgcctggctaatgtttttgtatttttagtagagacggggtttcactgtgttagccaggatggtctcgatctcctgacctcgtgatctgcccacctcggcctcccaaagtgctgggattacaggtatgagccactgcacccggccttttttttttaaaaaggaaaatgtgttgtttcaattctttgaaagatgtggatagggtgttggtaaagttacaaaatttgtggttacttccttattgtgtataccttaaagtacctttcagaaaggatatttttaaatatgtgtaatcccagggcacctgctgaagattcagttccattcaggattacttttaaatttttggcatcattttgtaacacaccaggaactgaaaccttgatggcccctgattcttgctgtttttgctctctgtaatagtaaaatagctgaacagagcaaatgataaagtgttttgtttcatgtggttctagtttgcctggttatttgcaagcagtttaattcctttcattcattttattgtcagttataatttgacaaaatgtctctagctttctgccttatgccacttagcatatacagtaaaactgttgatctttgtcagcagaagagtttaagattctcactaaagtgatcagaaatatattttagaggttattgaataaaatcaaggcttctgtctttgagcatacaaatattcacaactacttagtagtttgtttagatatttctgctcatattatttagaattacatctaagtatgtcagttttaatgattaaagggttataatgttaaggtgtgtgggaattgtgaagactaaaatttattttatattttatacttctgtttttgagaatgtatttgttttcagctttattctggtataaatttccatacaacaaaattaaccaatataagtttatagtttggtgagccttgacaaatatttaaattgtgtaatcactaccgcatcataataggaacacttctgtcagctcagaagttctgttctgtctccctgtagtcagtcttctccttcattctctgctgatcactaatgttttcttgctactgtaggcttgccttttctagatattgcatggatagaaccatacaatacatagtcttttgagtctggcttttttttttttttaacttaccgtaatactcttgagattcatccatgttgtttgtatcagcagttcatttcttctttctatgaatctataacattgtatggatatattataatttgcttatccatttaccatttgatggcaatctggactgtttctagtttggagctctcatgaattaaagcgctttaaaaattccagtgcaagtctttgtgtgacagtaggttttgattcttcttcggtaaatgaatggaatgctatgttgtatgtaagtatatgtttgacattatgaaaaactgctaaactgctttcccaaaatggctgtactattttgctttctttcagcaacagtactgtgttctagttgctccacatctttgccaacatttggtattatcagtctcaaattttgactcttgtaatggatgtctgctgctatgtccttgtgattttaatttacattttcctgtggattaatgatgttgggtatcttttttttgcttatctgcctttcgtatatctttttaaataaaatgtttattcaaatcttttacccatttaaaaaatcatgttgctttgttactgcattgtaagagtttcttttatttttaaatattccgggtaggagttcttagcagataattgttttataaatattttccttcagtttttagtttacctttttgttttcctaacagtggcttttgaggagtaaaagtttttaaggttgacatagatttatccttttttttcatgttttaaaaaatgtactatttaagaaatctttgtgtaaccgaagttcccataaaagtgtttccctctgtcttctttaggagttttatagttttaggttgaacatttagatatataaagtattctgagttcatttttataggtggtaaggtttggggtaagattttagatcttggggagttgtatttgtttacatattagtatccagtcgttatagcatcatttgttcataagactatttgttcctcattaaaatatcttggcatctttgtcaggaatcaatgggccatatctgtgaaggtctgtttgtggattctctcttctctgccattgatctatatgtctgctgtttaatatcaccccggtttggttagtgcagcttttatagtatgtcttgaaatcatgtagtgatcaatttgaggacaattaacaactgtattgagtcttctgatctcatggaatctctgtatttatttaagtctgcattaatttttctcaacaatgttttataaaggtttcagagtatgagtcttactcatattttcttaaaattatccctaattattttatatttattgaggcttttgtaaatggtattgcttttacttttaatttcaatttctaattgctcattgctagtatgttgactttgtgtctggcaaccttgcttttattaatacattatttattccagtatttttatagattccttaggattttctacataggcagtcacgccatttgtgaataaaccaagttttacttcttcctttccaatggtatgcgttttctttctttttctgctttactgcactggataggacctccagaatattgttgaataaaagtgatgagaatggacatctttggttactgatctcagaatgaaagcatttagtctttcaccaataaatataatgttaaccgtaggttttttatagatgcctttgtcaggttgagtaatttcctttctgttcctagtgttctgagagtttttatcatgaatagatgttgaattttgctgattttttttttttcctttgaggcagattcttgctttgttgtccaggctggtgttcagtggcacaatcacggctcgctgcaacctctgcctcctgggttcaagtgattctcatgcctcaggctccctagtagctgggattacagagacccaccaccacacctggctgatttttgtattttcagtagagatgtggtttcaccatgttggccaggctgatcttgaactcctgacctgaagtgatctgcctgccttggcttcccaaagtgctgggattacaggcatgagccgccgctcccggccccaaattcttttcatctaatgatgatcattagttcgtgagttttttggtcttttaataaactggtttttcaagtgctaaaccaaccttaaattcctgggatggacccatttgctcatgatatatattgctggattccattaacctaaaattttgttaaggttttttgcatctgtattcctgaggaatattgatctatagttttcttatatctgtctggttttgatttcagagtaatgctaggctcataaaatgagctgcattgtaaatacttttcttctgttttctgtaagagcttgtgtagagttgacatttctttcttaaatgtttggtagcattcaccactgaagtcatctaggcctgaagttttccttgtaataaagttttaaactatggactcaattgctttaatagaataaggctatttagattatctatgttttcttgagtgaattttggtagtttgcatagtgtcatggaatgctatttcatccaacttgatgaatttattgcagtaatgttcgtaatatttctttattttttcaatatctataggatctgtaatggtgtcactctgtaattcctgattcctgtcatttgtcgcttttcttttttgattagcctcgccagagttgtattgatattattgacccttttaaggaaccagcttttggtttcattgattttattgttcttctgtattctattttattgatttttgttctttattttctttatcctgcttgctttgggttaatttcctcctctttttctagtttcataaggtagaagtttagatcactgatttgaaaccttatgttctaatataggcatgtaatgttacaaatattgctgttagcactgctttagttatatccacacatttttatatgtggtgttttaatttttattcaatttaaaatattttcttctttttcttaatatttctactttccctgggttatttagaagttttttttttttttttttttaatctctgtcacccaggctggagtgcagtggcgcgatcttcactcactgcaagctttgcctcccgggttcatgccgttctgcctcagcctcctgaccctgagtagctgcgactgcaggcgcctgccaccatgcctggctaatttttttgtattttttttttagtagagacaggatttcaccgtgttagccaggatggtctccatctcctgaccttgtgatccgcccgcctcagcctcctaaagtgctgggattacaggcgtgccacgcccagcctatttagaagtttttaaaatttttttcaaatatttgagtttttccccagtatcttttgttttggatttctgatttaatactgttgtgatcacagagcatactttttattattttaattctcttatatttaagacttgttttgtgctacagtatatgtttgttttatttgaggtttgttttatgtgatacaatatgaacatttgttttatttgaggtttgttttatgtgatagaatatgaacattccaagtgcacttgagaatgtttcttatgctattattgggtggagtgttctatattgtgttagctcagattggttgaggtttttcaagttttctctatcttgctgattttgtttgtgtttatcaattaagagaggagtattgaaatcttcagtggtaattttaaaaatttaaaattcaatcaaagagaattataatattaagagggttgggaggtgtaaaggcaatatttaaattttttttaatttgtggggaagggggaagtatttgctttttagaataacacagacttggcattccagcaccagtcctgctgtttattacttcagcaacccctctgagcctgttttttttttttgagatggcgtcttgctccgcccaggctggagtgcagtggcgcgatctctgctcactgcaacatctgcctcccgggtttaagcaattcttgtgcctcagcctcctgagtagctgggattacaggcgtgcaccaccaccatgcctgggtaaattttgtattttagtagagatggggttttgccacatttgccagacttgtcttgaactcctggcctcaagcagtcctcccacctcagcctcccaaagtgttgggattactggcatgagccacaccaaatatgtattttaatatttagtcaatttcatttgttaacttttttaattttacccttggcctacactatggccttcatcttcgtgtatcttttcttattgcttttgtatgcctaatttttattgacaacctctaaagatccttgagtatagattgctgtggtaatattgtgaaaaaaaaatttttttcccttgacataagtttgctcaccctgtattaaagaaaaagataggaatgttggtcagttgacataattttggcacctgtaaaattatctcacattacttcaatgtctgaaactctgtgttttctttttctttcagataaaccgagaaaactggtgtacaatagagccatgccctgatgcagcatctcttctggcttccaagcagagcccaggtaagctgagattatccattcattttctggagctgcagccccactctggcagatcgttttatttggagatctgcccttccttagcatgttatacagtaaatcagaggaagggatgtatgtgatctgggtttgtaggcattttgtcttacagttgaagatgaacacatgtaattaccgaattttgttttggtagcaacagacatcataggtggctttatgattcattcatttgtgaaggcatctgtgctgtgcatatacatatgacataggatttttaatctggtaaaagtataaatatactgttaaccaaacctgaggttctcaattttgaatgcacattggaattatctggctgaacaagctttaaaaatatactgatgcctgggtcctacctccagatattctgatttaattgggtggggtgtggcctagatatcaaaatctttataagctcctttgattaccctgctgtgtacccaaggttgagaaccattacactttggacacatggtcaggaattaagtctttccttaagtacctttgagttattcctaacaacacttgagggtacgatgctcttaagaccttgcttgttaatgacacagcacatagcttgtgattagttaggattcccaacttttaaaccaggtccagcctctaactctgtgtgatgtaaagtatgttccctaatgtctgtgtgctccgttgtctccctcccatctgtaaagtgttagtagcctgtctcattttgagggtgtagtacagatgacatgatgagtaatccctgtgcctgttctacgactgctaagtgaatactagtaatttgcattctgagtttttttagtctgttttacccagcaagcctctgtttgccttcccaatttttactgcccagctttaaaaattacctagtcttcatttgcaggtctttttagaaatagtttacatgtagataccctccagtagtattaaatttaaaaacaaatggttttgaatcctctaactccagagcagtttcctactgattgtcaactctctaactttactacaaaggaaatattgaaaacaaatatgagaagtgtttttctctatttttgtctcattttttgagagtagttaaggatattatgctatagttgtgttcagggtccaagttttacaagattggccctgttcacagatttagctgacacttcccccatgtagcctcctagaaccttctacttaaacgtgtaccacttactactgtgttttgggtccttaaactgtttggggctttttctaaaagtgtaattaaaaccacccaagagtgagactttctgccaagtaaaggttaaatgaggttggtcacagtttgaatattcataggaaggaaagatctccacacatcatagtttaatttctatatttagagaaataatttttgaacccctggatgttttccccaggacacaattttgaattctgtagacctactgtacaccctaaccccaagcataagcaatttagtctttttagagtaattattgtaaaatctcgatttaacagaattgcagatcagaattatgctactgagcttcagacctgagattttgattttaggcatagtgtttttgtgaatcccaggtactttgttttgcaggtttctgtattttactttatacacacttcctcaagagagcaatagcattagaccaaataagatattgtcttttggccgggcgaggtggctcacgcctgtaatcccaacacttggggaggccgaggcgggcagatcacgagatcaggagttcaagaccagcctggccagtatggtgaaactcccatctctactaaaaatacaaaaattagccgggtgtggtggcacgcctctgtagtcccagatactcgggagactgaggcagaagaatcacttgaacctgggaggcggaggttgcagtgagccaagatcatgccactgcactccagcctgggcgacggagcaagactccatctcaaataaataaataaataaataaataaataaataaataaataaataaataaataaataaataacggagtctcgctctgtcgcccaggctggaatgcagtggcacaatctcggctcactgcaagctccgcctcccaggttcacaccattctcctgcctcagccttctgagtagctgggactacaggtgcctgccaccacacccggctaatttttttgtattttcagtagagatggggtttcaccatattagccaggatggtctcaatctcctgaccttgtgatccatccccctcatccttccaaagtgcttacaaagggattacaggcatgagccaccgtgcctggccaagatactgtcttttaaaatcactttgtatactcttcaataatggataaattacaagatagaattatgattagtgtgacataacagagcccaccggatttcagcagtgtgttttcctgcccttccccaacaacagtttgttggcatatatgttgttttaaacctaaatgactagataacaccttttaaaaagtttgtattatgttagcttctgaaaagctaatagctcagtacacaaaaattacagacagatttacatatgggtcataaaatgggactggccctacctgtgtccacctttaaggtactgtcatctggatacttactgaatcatacattaaaggttaatgaagccttaacttcattagacacatatatcacacacctgctatgtgctggaaaccagagttctggttactgtatgtataaattattcctgtcactatgactcctttagggaagtactaatcatctcttgtcactgttatggaaatggcaactgagaggggtgaaattacttcttgcctggaatttttcttctattaagtagtcagacctagatttaagcctgatcagtctaactaaaaaaccagagctctttactcttgtttacacttagatatgccgctcccctttattcagtaggaaggggacaaataggaagaaagaaaagattttattaattttgaaaacttaccaattcatgtgacacagggtgtggattagctctgcctttagggattccccccacctccccccgccccatggcgttagggggttataatggtttacggtccctctctctccatcttagcccttctttctgtacttttccctctttccctcctcaacagtcagctttatctcacagagcagactctcgtcccaaacttggtttgttatcccttgtggtgctggcttgaatttattttctgggtgaggtattcctcccagggctgaatctggatcttccccatgaattttccattcgaatatcgtgagctagtttgttttccagtctggaatttggacgtggtctgttagagggccagctggacagcgagcagctcagcgtagttgctgtgacagccctttcttttcttggccagcccccatatttttccctcaaccatggaaaggcatttttttattttttcaagcagggaaaggagaaggaatagatcacacccaccaactcctcctaggttactacatactctaggaaacgtgaaaaaaaaaaaacctccagaatacccatagtttccagtctgttaaaggcagggctgttcccattgaactaacacactccaaaatagtttgaaccaagactgaaacagactaaggtgattttttttttaaatgaaagattttcagattcatccatgagccctctctcacttcctatggcattttttttttttgtaattctttgttgaaattgtcttctaatatgttcatttctgctacaagacagtaaactgcttcccccccaacactaaacatttctttttatttggttactccccagtatttagccagatgcttaactagtagaaaaagtaattttattggcaggggatttatgacctataccaatgcaatgcaatgcagccttgacccttgctctaagctaccagcgcaaataattcagtgattatcactaattacttaactgttaattagaagaactatttcttcccactttcaacacacagagacaacataattaccatccaggcataaaatctaataatcaaaggagacgttggaagttatgtagtccaaccctcacttccctctctgtgcagataccttttctgtaatatcttgacatagtcattctgtgttccaaaacccttctggtaaagtgatagtcattactttataggccacccaacctattgctaagaagccccgttttagtgaagctctgtagctcacactcactggtctttgcccctggaacagtacagagggaatctgtgacagtctttaggcacattttcttcaagctcctcggcaagctgtatgtatctcagacggtttgactgtcgtgaccccattactacgtacacatttttgtttatcagtgttctacttgagatgttatttaggaacaagtacagtcccgagggtgtggtctggatggcacatagcgacaggactgtccccgttttggatgcccgtgtactatttactaatagagactaaaactattagtgtttctttggttttgtcatcaccttgtactgtcagttccttttgaatttgcttcccccaaaacctccaagtagagttctctttaactcctagatagccaggtttcttgccctgtccctcatcatttagtgtcacctacaaatttgataaagcatgcctacctggttgtccaaataacacattaacttgcttacaaaaacagagatgcatgacttttatcttctttttttttttttttggaaatgaagttgctctctgtcacctaggctggagtgcaatggcgtgatcttggctcactgggctcactgcagtctccgcttcccgggttcaagcgattcttctgcctcagcctcccaagtagctgggattacaggcacctgccaccatgcctggctaattttttgtatttttagtagagacggggtttcaccatgttgaccaggctgttctcgaactctggccgcaggtgatccgcctgcctcagcctcccaaagtgctgggattacaggcttgagccaccatgcccggccatgacttttatccttaaaacttcttagggccaggcccagtggctcacacctgtaatcccagcactttgggaggctgaggcaggtggatcacatggtcaggagatggagatcatcctggctaacacggtgaaacctcatctctactaaaaatacaaaaaaaaaaaaaaaaaaaaaaattagccaggcatggtggcacgtgcctgtagtcccagctactcaagaggctgaagcaggagaatcgcttgaacccaggaggcggaagttgcaaaaacttattgaaggaagctcatatccactcagtaatggacttgggttcttggtttcaccatccacaaatctctttaaccgtgttggtacccagtcacatgtcacttttgtttacaaagttaatagcctgggcaacatgccaaaaccccatctttacaaaaaataaactggacttggtggcgtgtgcctgcattctcagctacttgggaggctaaggtgtgaggattgcttgagcccaggaggtggaggttgaagtgagctgagatcatgtcaccgtagtacagcctgagcaacagaacgagaacttgtctcaaaataaacaacacaaaacagaaaagcaaagttaataagagagaataccttgcttatttcaagctactaagtttttaggcttcctcaatgtacaaaggtagtatttctgtcacagacccctccctctagcttgccagggtccctgttctagttattgaaccgaaaacattctaaatgataaatttttccactttggcatattatgcccccaatttaagagctatttatggtaagaaaagttaaattatatttctgttattactcagtagaacctataagtttaaaacaaaccccatcacatagttgctagtaaaagactttggattttgaagacaaaagaaaaaaaatgccctcactaccatgaggaaagcattaccattcaggtatctaaatagaagtagaatatgcttctaaatcatccttttatctttctgtacctaatataaacgtggcagatgcatgattgtcctgtaggagctatttcaacctagaattggagtagcagagctactaatttgactgtgtccttttatagcttcttaattttgaaaaaaagaaataaggagggaaggaagagaaaagagtgagagagagatttaaaagactggttgctggggtgaaaaggaagtggttctttttgttttttggtttttttgttttttttttttcaatattggtgaataaattctctttttcagaatgtgagaacttcctggatgttggactgggcagagagtgtacctcaaaacaaggtgtacttaaaagagaatctgggagtgattctgacctctttcactcacccagtgatgacatggacagcatcatcttcccaaaggtactgtgtggaccttcctttcatttttgtcacacggcttttgtgttcctatttgggcttcccaaactcttttccaactttttccccctcttgtgctctcctgtttccctaaatatgtaactcctgctagtaagttgtgatccagctagccttgtagggcctcactcactctgagaggcatgtaaatgttctttggagaaggaagcgccagattaccagggtttagaaaaaggcactgggctgggcatggtggctcacgcctgtaatcccaacactttgggaggctgaggtgggcggaccccttgaggtcaggagttcgagaccagcctggccaacatggtgaaaccccatctctactaaaaatataaaaattagctggacgtgctcacttgaacccaggaggtggaggttgcagtgagtcaagttcgcgccactaaactctagcctgggtggcagagcgagactctgtctccaaaaacaaaaaaaagggaaagaaaaaagcattggccaaagttatttaatgtgaaattgtggccagttaaatacagattttgaagctcacttgggagtcagaagaaatggaagttcctttagaattaattaagtcagatgacagtgaacacttctcagtgggcagcaaggaccgcagctcagactatatgatgtcatatttataaaccagctgtagagtcatttctggttaatgtgtttaggcctgaagcttcctgctgagtgtggtcatatcactcatcctcatctagcctgcctaattggaactttctagatctctgcaatagagcccttccacatgaatcagctcacatttgcatataattggaggctgcctaagggaggtggggaatgggggtagtttgctttcttttgcttatatttgtttctagtggcagcaagttctgttttgctcacctgagaagaatagagggctttccccacagcagagatggcaaatgctactcaattatatgccacaagtggttttcttaatggtaaggaggtgaagaggcggaaacactgttgcatctaccaacacggttccttctagttttataatgagctcggagaagtggtgagagcagttgtgttagtgggtgattaggttgtccaagatggtgaatgatgctgtgtagaagttacaagaataggccgggtgtggtggctcatgcatgtaatcccagcactttgggaggccaaggcgggtagatcacttgaggtcaggagttcgagaccagcctggaaatggtgaaaacccgtctctactaaaaatacaaaaaaattagctgggcatggtggcgcgtgcctgtaacctcagctactctggaggctgaagcaggagaattgcttgaacccaggaggtgaaggctgaagtgagctgagatcacaccactgcactgcagcctgggcaacaggagtgaaactccatctcaaaagtaaaaataaaataaaatagaagttacaagaaaagagacctaaagatttgggaatcaggagcatatcagtgcctctgtgaatgtaccctgtgtgccttcctttcatttttggccttccctgacttttttttttttgaactcattgtcttcccaaggtctttggaaagacttatttaatatgatgcaaacttaaggatttctatcattgtcactcatagtgacttgacaaaaaattctatgaagtaaaaactccacatttaggaccgggcgcaatggctcacgcctgtaatcccagtactttgggaggctgaggcgggctgatcatgaggtcaggagatcgagaccatcctggctaacacggtgaaaccccatctctactaaaaatagtggtggcgggcacctgtagtcccagctactcgggaggctgaggcaggagaatggcgtgaacccgggaggcggagcttgcagtgagccgagattgtgccactgcactccagcctgggcgacagagcgagactccatctcaaaaaaacaaaaaacaaaacaaaaaaaactccacatttagaagatctgcctttctctttacttaggaaaagagaaatcaatagttttatgttattttattttttttttaataatatcagaatttaggtaatttccactgcgactttcgaggttttaattgtaaggaattctgttccccgcaaggggaataccattctgaagatatgtgtcgctaaaaacatactgagataaacagattagatagtatctctaagttccagctttaaaatgggatcattgataatcattgaaactaggtcatggatatacagagatttgttaaacatttatatatgtttgaaaattttaacgtaaaaagttttttaaaaatggaagtgtctttgttaagaaatacttccttgcaacctcctaggtgcatgacagcttgtgcctggatgttaccatctctgcagactcagagttacttctggtcacttaattgaatggttttcttagctaaggagaattagaattttctatatttcgccgtcttattttcccagaaccatttacaaaattgctcatataaatggcctgtgctagatttggaagattttttttttcaagaatattagacatataatttttaaaagttgaaggaggccaggcgtggtggatcttagcattttgggaggctaaggcaggaggatcacttgagtcaaggagtttgagatcagcctgggccaatataatgggaccttgtctctacaaaaaataccaaaattagccagacatggtggtgcacacctgtggtcccagctattcaggaggctgaggtgggaagatcacttaagtgtaggaggttaacgctgcagtgagccgtgatggcaccactgcactccagcctgggcgacagagcaagaccctgtctcaaaaataaataaataaataacacctacattttatactagactgcttagggaaaaccagaaatggtagcttcactttcacctcctcatgcatgcttgagaatgtctgcatggcctgagaagagatggggaggatttttctcttagtgtttttgctgtaccaaagtagcctgtgaccaggagaggctttgcaataaatgtttgctctagcattaataaaaccaagggctgacttacaaaaaggagagagactaatattgacaggatacttactgtacagtaggtactgaactaaatttttaaaatatttgatctcaatttgtctgcccagcaaccctgacaagtgggtggttttatgctcttgaggaaatagaggcactgataggtaaagaaatgtatccagaattacttagtgggtgagcagccaacttgaggtttgcatctaggcctgactctaaaatctgttcattttttattttactctcaacctccccaaacctgctctaatagccagtgattaaataaaagcgtggcactggcagataggccatcagctgcttccttaaaagtcttcctcagtggtcacccccagagtgtgctatgcaaaatatcagaatgtcttgcagtttgttcccaggttctaaccctcttctccatctctaaaaaataatctgtaggcgagacattgcaacatctttttctgtgaaccatgagtggtacatgaggtcacttcctgcagccatttgtgtctctggcctcacagaggtctttaacagcccgtaacgtttgtcgtgaccttttcaccttaaccctgtctttccattcagtatgcctcctggtaaatgactctttagtgagtgttatgagcttcacgtttattctcatgaatatgtgtgggttcctaaggtctttaatcaatagcataaaatttagattttatttttaaagtgaaaagaaatcctaggattctttttggcactagctaagagagaaagtacgattataaaatatacatgatctaggccactctactatccaaaaggataattaaagtctacaggaaatattaatagttgctgcctgtcttcccaaagagaggtaaatcaaggtccttccatgttatttttcttccccaggttagcagatgtatctacaattgatttaaaaaaatcagaatgacttatataagatacaaaacctaaagggaacatccttctttcatgtgttgtagtttttctcaggtccttgatccccaagccaaaaaattacttaaaaaaaaacaataaacctttttgagataaaaataaatgtaagccaggcatgctggttcacacttgtaatcccaacacttcgggaggctgaagtgggaggactgcttgagtccaggagattgacaccagcctgggcaacatagtgagaacctgtctccagtaaaaaatttaaaaattagccaggcatggtggcacacgtctgtagtcccagctacttgggaggcagaggcgagaggatcacttgagccttgaagttcaaggctgcaatgagctgtgattgtgcaactgcactccagcctgggcaacagagggagatgctgtcttaaaaataaataaaagtaaatgtatttacagaatcctaattaagaaaatgacaattgcggctgggcgtggtggctcatgcctttgagaggccgaggcaggcggatcactggaggtcaggagttcgagaccagcctggccaacatggtgaaaccccatctctattaaaaatacaaaaattagctgggcgtggtggcaggcgcctgtaatcccagctactcaggaggctgaggcaggagaatcattcgaacctgggaggtggaggttgcagtgagctgagattgtgccaccatactccagcctgggcaacagagtgagactccatctcaaaaaaaaaaaaaaaaaaaaaaaaaaaaaaaaaaacaacaaaaactgcaattgcctgtgcacaagtgctgaaattattaaaaacttaaaactgtgaaccagtggtaatgcttgtaatcaggtacttttcttaaaatattgaacataaatggattaaatggttggcatgtgttaggtgtttaaaatgtgagccattattttccaaggcacatagtagagtgccttgtgtatcattacaaataataataataaatgtttgggaataaatggagattaaaggactagtattttggcaatattaagcatgatttcttcaagtatagtaataagatataaagtatgcagcagttttgtaattttatgtttataatgtttatacctctgtatatacttacgtatccatacctgtataatgtaactctggctaagaaagccaatcaggcatttttcccaacattttattaagaatatattgaggcatatagaaaatttggagaattgtacagtgaacacccgtatacccactacttagatcctacaattaacttttaattgtatttgctctattatgtaactatatatctgtccatccttctgtccacccagtttgcctgaattctttgaggcaagttacaaatatcgatatacttcacctctgaacacttagaattcagtatttgtttataggttggttgggtttttcggtgaagtttacatacagtgaaatgtacaatcttgagggtaccagtcagtgactttttaaaaaaaaatttaatgactgcttcacgaatgtgtgcatcatccttgcacagaggccatgctaatcgtctgtgcattgttccgattttagtgtatgtgctactgaagtgagcacccatcagtgacttttgatagaagccttcattcacgtttgtacgcagcctgcagcagggtacagactataagcatcactttggagttgcctcatgtctcttctcagtcggtctccattcacaccctctcaaggcaacagctgtcttaactgttttcccaccgcagattagttttctgtttcagaacttcgtataaatggaatctaaataatatcatttctcttgagaaatacctaggattcgaattcttagattatatggtaggtataggtttagtttgctaagaaacggatcttttcccaagcggttgtaccattttacattttcaccagtgatgttttgttttcctttttcaagtaataaccaccaattcatagtaagagctgcatactgcagtaaaaataatgagtataagaatattattctgtgtgaactttattcttaccagatatgcaagactgtagaaatcatgtagtttcagtgagatcagagttaaaagcacatattaggaagaaaggctttgtgttgagaatatattctagacagatctctttgtttttaaaatgtgtataaacaggccaccaaagattttcccaccttattttaatgactctcaaaagggtagatggttgttttataaacttcagattcgttaagtgccagagagatagcaggcctttttttcaaggcaaaatccttccaagattggatgccagagtgaagaagcacctatataactgtctgtgagttgtttccaaactgagaagagctaacttgtaagaaggctatatggtaaattaataaatggaaactttaactcaaaatttttgtttgccttgaagtcttttttgtgtgttttagaacaggcttgttatacattttgctttattggtgttcattctgtttgtcccttggtattattttgagaattagacatttaggcagctaagcgtgagtatattagcttcctagggctgctgtaacaaattactggaagctgggcggctgaaaacaacaggaacttacttggtcccagttctggaggctggagatcctaatcaccgtgtcagtggggctgctttccttctgtaggctctgagagaaaatggcctctcttctagtctctggtgcttgttcagtccttggtgttccttgggttgtagacactgcactccaatctctcctctgccttcacgtggtattctctcctgtgtgtctttttgtgtctcttctcctcttgcagggacaccatttgtgttgggatctggggacattttggatccaccctactccagtataacctcatcttaactaattacatctgcaaagaccctctttccaaataagctcacattctgagaaggacctgtatctgaggaggacattattcaacccagtacagtgagaaagccgagatattcacgagaccatttacattgtccttgtccatggaaagttgccccgtgaataggacccctttaggaaacccctgagtccctcactcagaaagcatagtcagttatttcattttaaaataatacctaccacaatttagaatttactcagtgaaccatagttttattttacagagtgacccagtgaagggacttttctgatactgactttgatatcttgttcttacagggttttttaaaaagatgattgagataccagaatagggcaatttgagttgaaatcagcctgggttcaaatcttgattctgctgctcatgcctgcgtccgttggaaaatctggacctcagtttgacctgtccagtgatccccttgcatcttttctctcattcccatacattacttaaaaaacaatctaggaaactggattccacggaactggaaaaagaaagccttcttattagcttatgagatcaagcccaaaaggtaggaagggtgcttttagaaggtagtgtgcttttgaactattacatcaaacctttaaaaagagtctccttatagtatagagatatagagcttgttttctattccaaagctgaaagattttcataatttttttctctttcttgaagaaccataatttttttttacccttaattaaaacattgagtagactaatttggaaaatattgtgaaaaagggaaaaagaattacaaaatgcccttccctgttccctgcccccatcccgtaagagtgcaaaatagctattaagacagtgtccacatcttaagagtatgatcaaacatctcttagacacttcttttggccttttgggtaccatgaagctcatctttccctcacccatcaaattctgtgttctggtatctccttccctcgctccctctcaggttcaagagattttccttcctcagcctccccagtagctgggattacaggcatgagccactgcgcccagccactggtatgtttcaacaagtagaaaatgtcaggctactagaacagagttacacagaacctgttaggcactagaggttagccaggaaagagcatcatcactttatcaaagacctcattgccaggactgattatttaatgtatgatttggcctcataatactcagccagttctcagtgaaatgagaaaaatgtatagctttcttccatttagatatttgtaacaggtacttatgcatttgtggcaaactttaggtggggtcataagctattccacatttttcagaaggccactaaaaacaaccacagacttccttttggaatattaatttcagcatattattattgtagccaagcagactgttttgttttcagttaaagcttataaaaaataattaaacctaacacatgataaattttgttttcatatacaaaaaacccagagacagatggattcccttcattgcagttggtgatatttactgaaagaactaacataaatttgatatttttcctcttgaagaaaaaaatgggctggtcacggtggctcaaacctgtaatcccagcactttgggaagccaaggcaagaggatcccaggagttgaagaccatcctgggcaacatggtgaaaccctgtgtctaaaagaaatacacacaaaaaattagctcagcatgctggcacatgcttgtagttccagccactcgggaggctgaggtgggaggatcacttgggcccaggaggtcaaggctgcagtgagccataatttcaccactgcaccccagcctgggtgacagagtgagaccctgtctcaaattggaaaaaaaagaaaagaaagaaaaaatgatgtacttctagtgtagtacctctagtaagaggataaaaagaggatagacctaggccaggcgcagtggctcacgcctgtaatcccaccattttgggaggctgaggtgggtcgatcatttgaagttaggcgttacagaccagcctggccagcatggtgaaaccctgtctgtactaaaaatacaaaaattagccaggcgtagtggtgcatgcctgtaatcccagctacttgggaggccgaggcaggataatctcttgaatccaggaggcggaggttgtggtgagctaagatggagccactgtactccagcctgggcgacagagtgagactgtctcaaaaacaaacaaaaaaaagaggatagatctagactgtttctcttctagagtccaggggggatttgaatccaattgtgatcatcctattaaaaaaacaagtctctgaggccaattatgatcttacctgcctggaatccactgagaagccattggcttgatctagaataactgaggctatctgattggccctgctggcttcaaccatatgtgctttctctccattacagccagaggaagagcatttggcctgtgatatcaccggatccagttcatccaccgatgacacggcttcactggaccgacattcttctcatggcagtgatgtgtctctctcccagattttaaagccaaacaggtcaagagatcggcaaagccttgatggattctacagccatgggatgggagctgagggtcgagaaagtgagagtgagcctgctgacccaggcgacgtggaggaggaggagatggacagtatcactgaagtgcctgcaaactgctctgtcctaaggagctccatgcgctctctttctcccttccggaggcacagctgggggcctgggaaaaatgcagccagcgatgcagaaatgaaccaccggaggtgagatgggaggcggtttgtttagtgtctcagtgtctgcttgcttttgagaagcttctgatttgtattattgttggtaaaagaatttaggagaccccatagtatagaagaaagaatataggctttggaatcaggaaaatctgtgttcagaccccagctccaaaatttactatgtagatgaccttgggcaagtcacctgacccctctaagctttaatattctcatctgtaaaataccttcattattatttttaataatacaatgaaatgtgattgtcatataatgagtgtttagtaaatgggaatgtttattcttaccacattaatgaaacttatgaatgagaaaatattggaggcagtagtttcatgtcaactttgaattaagaaacaaacatgaagtcttacagtcttaacacatcaaagtctttcagagtattttctgagaattaaaaccatctgtttctaatacagaaagttttgataaagtctaaattatcattgtttaaccctcaagaggatataagactcattacattcattttacattcattacataccattaaattgttgggattttcccatgtgggaacttgtattaagtgtgacccagtatcagtccttcaatttggaagcaggctatatgaaggtatgtcgaatttgacttcttttttttttcctgagatggagtctcgctctgtcacccaggctggagtgcagcggcgcaatctcggctccctgcaagctctgcctcccgggttcactccattctcctgcctcagtctcccaagtagctgggactacaggcgcccgccaccacgcctggctaattttttttgtatttttagtagagacagggtttcactgtgttagccaggatggtctcgatctcctgaccttgtgatccacccgcctcggcctcccaaagtgctgggatcacaggcgtgagccagcgcgcctggcctgaatttgacttctgactgctggctggctagacaaatgtaagcagatggttttagctttaaagaatgagtatggtagtgcctactatatttacaagagtgtgcttattccaaagctactttgctaataagtaaaacagataagggatgaggctgacagttgttttaaaacaattgatgtaatctcatgagcccaggagtttgagaccagcctatgcaacataggagaccccatctctacaaaaaagaaaacagccgcgcatggtagtacatgcctgtggtcccagctactcgagaggatgagatgggaggattgcttcagcccagaagttcgaggctgcagtgagccatgatcataccactgcactccagtctgggcaacagtgagaccctgtctcaaaataataataataatagtagtaataataataattgatgtaaacagctcagcaatagcaattatttgctcaaatttctcaacctcctgataatattatggctgtgtaatcacattcattcacttatttattcagccaacatatattgaacactcactatgtgccagactctgctctaggttctggagataggtaaacaagacaaagtccctgcctgcatggagctcacagtaataccttcttacactttcctaatttgctaatcttttcagactctctttataacacatttctgatataatttttcagtcctctccatgagtcgagtggtattatccccatgtttgcagatgagaagactggtgcaggtagtttgcatcatttatccaaggtctctggtctcttagtcaaatgccgtttctataattccatattattctatggtggcatgtaggatgctaaccttaaaaataagcagcatgctttttctgctagcttgtttttatatacgtttgagaccctagattttataaaaagtaatttcccagttttgctcgtggtgtactctttttttttttttttttttaagcattcagagcaacagaaaatgtaagagcatggtgaatgatccctacagccagagcttgaagcaaatgtaacttttttggcaggacagtcttatcttaaatgataacagcatcaaggaatgagggtttattttctatacaatccccttttctttataatccactatgggttcctttgtcacaactttgattttagagctacatgtgactgtgtctgtcatgtagctcagatgaggaaattgaagctcagaataaatgatttgcccaaaattacatggtgatctcagttcagttctagactgaactgagactagaactctacttcttttcatcctgcataatgtcatgggatctcctgtttgaatttactgctagggcttacctaggaccactgtcctaatacctctgaagataatggaatgagagtgaggttttaattagtttggctaattgttatggtattacctgcatgtagtataacctgaattttaaagtgttaagaaaaacccctttaaagctttgagtagtaatttttttctgattctttaataatttaataaactttgtaacttttgccatctgattaactccttggagcaaggggaggagcaaagtagccctccacagaaactgtcaggcccttttggtcctgatgtttttctcattccacattccttcattctcttgcctgtgccatttctctttgagcagtgtctctctccccagtgtggtgtctgtatgtttcatgcatttgtatcccattttgtttcacctgcaacactgacctcttcaccattcattttcagttcaatgcgagttcttggggatgttgtcaggagacctcccattcataggagaaggtacagagttcattaacttgatggactaaccatgtcacctctgagcatatactaacaagcatctcattctgcttaatccatgattggatcatctacttttaagtaatgtcccatctaattcaggcaaataaaatataggtacttattaattgctagtgtccattttatatgaaatggtttctttaatttgaagttttatgctattttatcttttttaaaaattatttttaatttttttaaatcttgtgcttattgttgttcagatgactgtgagaatagggtctcacctagctttctctaggagagttcgaagaattgtctatgtcgtgcctatttaatggaccctggggagtactttttttttcttttccacaaaagaaaaaccaggaatgtgtgtgtgcttgtgcacaggccctaaagtattgtcaacacattgtttaataatgtaatgaaagactttattactaggccacctggcattttccattccattgtggatatagtcatttcttaaagcaagtcagaggcataagttcattccttggcctttgaattccttaattagtatttgtcaggtaatattttgaagctaaaaataaacgatttataagctgagaagtaatttctagtcagattgctaatttgcttcaaattttccgttggattttctttagaagtcattagtgaccttccattgtttagaaaaatatttagaaatccaaaaattagggttatattactgttagtttctcaggaggcatttgtaaagaagtatttttaactattagctgaacctgtttgttggcaagtgggcaaatagtgatctttcctactttgtctttttcaagtggatgctttctttaattccagattttaggcaagaaattgagctgaaattcagatattctcatgaatttcagataatcatgattcctatgaaattgttcttccagaaaataagttgttaaataagttttaaccccatctctactaaataagtttttcagtagaaggttctttggagatacgtttgtctgggtctttattaaagctcttcaatatgagcttattaaaaacatgcacttgatgacaaggtgggagacgacagattgctggatgcagtctgagttagtgtatacatggagtgtcatcaacaactccagccagtttcatccctagtgaaacttatttttgtaggaagaacgtaatgtataatttaaaattttataaaattgaaacattacaacaggtattataaggcaggaggagggacatttgttgttttttaatctagaactttacaaatctcaaagccaaagaactactaaatattatccctactaattgaggaattgaggaaatgacgatgctttccaaaatactcttaattatgaaaggagttttctgttaccagaaagggcagacgttgtagaccatctgcagcttccttcctggtaccttagaaaagctgttatatcttggccgagcacggtggctcacgcctgtaatcccagcactttgggaggctgagccagatggattgcgtgagcccgggaatttgagacctgcctgggaaacatggtgaaacctcatctctactaaaaacacaaaaattagctaggtgtggtggcatgcacctgtaatcccagctactcaggaggctgaggcaggagaattgcttgaacctgggaggcagaggttgcagtgagctgagatggtgccactgcactccagcctgggtgacagagtgaatctaagtctcaaaaaaaaaaaaaaaaaaaaaaaaaaagcttttatgtctgtcttcctatctccctattgtttttcactctcttcgtgttaaatctcctcacagtcttccacatcattgtcatatcctggaagtaaaggaacatttaaatctgtagaaggagattatttttaagaatgatggtttggcagtgtatgttcagttactgatttgccacattctgtttctaaaaaagaagttggatatttaggtaaaaatatgcctatttattaactggcgatttaaaatttaagttaataatgtcaaagaatggacttctgagtcttatctgtgtttgtaaaatatatatcttctcctcacacaagtaaattatgtcagtgtcatcccacttaccagaccagcgaagtgtctccactatatttttactttctgcttctgcacttgtaagctttataccactaatttaatctgatttaaaatgttttatactatttagttttaaatgatatggtaaagattttttaaaagagccataggggtagctcttacatcctcccacccattttccttgtctcctttctccagccaaaaaccccacttgacaacaaaacaaagttattagatgtgtccagtataggtgtttttggtgccaggccttcccatctgcaagattctggagggagccgagtggttttattgagccgagtgtttttattgtccacaagctctgcttttatctcttctcagaaaacaaaaacacatcacctagaactttatggcccaggtagcagggtatttttttaatgatagcttttgttaataaaaatcccaacatttccatgcagtttcctttatagaacacacaatattttgaattgattattgttttagctagtggtgtttacttagcatttccaaccccagattttctgtccttgctacttgataatggacaccgctactgggatattcaaggaagtagatgatcagatggattttttttatcttgtaggaaaaatggaaacaaacttgaaattaaaaagatacatttctaactcagtgccatagaattccttttttttaaatttttattatcagccaggtgcggtggctcaagcctataatcccagcactttgggaggctgaggcgggtggatcacttgaggtcaggagtttgagaccagcctgaccaacatggtgaaagcccatctctactaaaaaaaatacaaaattagctgggtgtggtggtgcacacctgtaatcccagctactcgggaggctgaggcaggagaatcgcttgaacctgggagacagaggttgcggtgagccaggatcgcaccattactctctagcctgggcaacaagagtgaaactccgtcttggggggtagttttcattatcattaaaacataagcaaatatataatcagtgttatatgctttatctttaacgtaacagcctagtgagtagggtttgaagatggatgccagtgttgactaagtatcttatcatgcagaatctattaatgtctggtttggttggatccgtaatggaaacacatgaaaaaaaaaaaaaaaaaccggatgactccatgagcccaccagagcacagtttgtcactgtctcttttaaaaagtctaggattagagatactatggtaagggtgatgtgggagtatgcgatgtactgagagattgtacccagtggtggagtttgaaatacctctcatgtctgaagagcaagccataggtagttgccacagttcactagaaggaatttttgggtttcaggttgaactggtgatactgtaaagaacccacagtctttttccacaatgctgtctagacaagaagaaaatatttttaagtttctatgattttttattatagcctttttaaaaattgtcagtgttacattcctaaattttttgttgatcgcataaatccgtctgtctctaactatgcccttcgtttttaaacctaataaccccattcctgtttcctcttttctccctgcatttctgtttctgtctttgatgtcatccccagtatgagctggtgcccctctggtgtgcagtactctgctggcctgagtgctgactttaattacagaaggtatgatattgttatgtgtcccgccaccaaatggggaaccataaaatacgccatcagggcttttggcttggagctggcttctgtgtggctgggatgcatatgggcagcctgctttgtctgtgagcacagcatttcattgcctttgctatgggtgtcactaactcagctgaagggatgcagcctaagagtcgggtgatgcatcctgtatgtctcaaatggccatagatttgatgttttctgcacagatttatctctctctgttttggtttgtcttgattttcagatcctaaaaattcttggaacccgaagaaaacaatcaaagaaccaaggcagctaataagatgcactgatttctattatgcttctaaatccaccattctgtgtagattccaaattcagagactcctcatcgtttcatattcttctctcaactgaacagccagatttaattactaaaacattttcagaattaagttttgcagtaagcatagatctggttttcttaggcttttcaagtaatttcttcttcacttagcccctcctcttatccctggtattgaaagtgagttttacaggccaggcatggtggctcacacctgtaatcccagtactttgggaggctgcggtgggcggatcacctgaggtcaggcattggagaccagcctgaaaaacgtggtgaaaccccatctctactaaaaatacaaaaattggccagacacggtagcaggtgcctgtaatcccagctacctgggaggctaaggcaggagaaccacttgaatccgggagatggaggtagcagtgagccaaggtcgtgccactgcactccagcctgggcaacagagggaggctctgtctcaaaaaaaaaaaaaaataggaaaagaaagaaaatgaggtttacagagtcatttacttgtagttagtcatgatttctattatattgaagaaaaacatatccattgtttagtttacctactagagaaaatagagttatatggcttcagttcgttaagttatttacaaaaccaaaataaataaataaataatttaaaaaagcaaatacaagtcctggactggtaggtatgaacttaattggagcaattttctgtacagttttccttgagtggaggtaactaagtagcttcagtataccttcagattgaattccagctcattgttagcggagaacatggtcagctacagctatgtttcgagatcttggttattttaaagaagtttccgctgcagttgtaacagatgtgaattactctagttagcaacccaaggaggttaaatcgctaacctgtctctgtagccttctgcttactgaaaatgcttttcattctgcaaaccacagaatctgtcttggaggaatcctctttaaaatgccaaatcctgactgcctttgttccctttaccaatatccaggcaaaaaattacaactctttctactcttagaccaggttgcttttcagcatttgttcattaaggtgttatatgtgcctgttgcaactaacaattctcgagaagtctgtcagcagttgtttggccaggtgtgcatagatggtaacactcatgagtaacacttgggttttcttgggtgaaagcatacctgtaaaattataaaggtcaacttgaatgtaaaattataaaggtccacttaatggacataagggcaagttacccagtttgccttctgaaagttacttaagctcgtattttctctgtgacatttaattacttggcattagtagagttagattcacaaagattaattagatcaaggaaaaaacacatatataaaatatcagataactatggtctgtccatatagtgtgtagaaaaaaatctgagaagtgatcttaggtggttcaacatttggataaatttaatgcggtaagaaaatctaagtgcagtattctttctcagtattccaagatctgtgggggaaaggtaggtagtattctttgtgccatgcccttttagacagttttgctagctgacatagaaataatacacaaacaagggagatatacccaaagggattttgtgtcctcctttgtttttgagacccagaaatagaatgaattaacttttgtgccctatgttcagtttcagtctagaaggcttgacaggaggagctggtgtcggaaacaagccatcctcatctctagaagtaagctctgcaaatgccgaagagctcagacacccattcagtggtgaggaacgggttgactctttggtgtcactttcagaagaggatctggagtcagaccagagagaacataggatgtttgatcagcaggtaagtcttaaatatgtctaatttggaaaaaatatatttcacaaaatatgaacatagaaggcaaggcttctggtagtataaggctagtagctatgattacttacccattatatgatatacttaatctagcactaaaccaagtgtttagcacctaattaaaaagggccaggcatggtggctcatgcctataatcccagtgctttgggaggttgaggcaggaggatcaattgagcccaggagttcaagaccagcctgggcaacatagcaagaccccccatctctacaaaaaatttaaaaattagctggacatggtggtttgtgcttgtagttccagctactcgggaggctgaggtaggaggattacttgagaccaggagtttaaggctgcattgagttgtgattgcaccactgcactccagcctgggtgacagagcaagactctgtctccaaaaagaaaaaagaaaaaataaagactacgttaatctgcatagatttaaatattccatcaaggcacactttttaaaattaggaaagtatccaggatattaaattgagtttttccttcttatctgagaccatcttttaccctctcaatagtaaactgaatcttgaaatacgctacatatcgttattaattttcccaattctctaaaacatatcccaagtttctcctttgtaggaaaaaaattaaaaacaaaactttcttactacaccttccaggaaatgtcagttgattctctctccttcccatccctaccagaattctttttttaaaaaattattatttttacactttaagttctagggtacatgtgcacaacgtgcaggtttgttacataggtatacatgtgccgtgttggtttgctgcacccattaactcgtcatttacattaggtatttctcctaatgctatccctcccccagccccctaccacacaacaggccccggtgtgtgatgttccccgccccgtgtccaagtgttctcattgttcagttcccacctatgagtgagaacatgcggtgtttggttttctgtccttagcgatagtttactcagaatgatggtttccagcttcatccatctccctgcaaaggacatgaactcatccttttttatggctacatagtattccatggtgtatatgtgccacattttcttaatccagtctatcatggacatttgggttggttccaagtctttgctattgttaacaatgccataataaacatacatgtgcatgtgtctttatagtagcttgatttataatcctttgggtatatacccagtaatgggatcgttgggtcaaatggtatttctagttctagatccttgaggaatcgccacactgtcttccacaatggttgaactagttcacagtcccgccaacagtgtaaaagcgttcctatctctccatatcctctccagcatctgttgtttgctgactttttaatgatcaccattctaactggtgtgagatggtatctcattgtggttttgatttgcatttctctgatggccagtgatgatgagcattttttcatgtgtctgttggctgcataaatgtcttcttttgagaagtgtctgttcatatcctttacccactttttgatggagttttttttttcttgtaaatttttttaagttctttgtagattctggatattagccctttgtcagaggggtagattgcaaaaattttctgccttctgtaggtcgcctgttcactctgatgcctaccagaattcttaagagagcatctatgctccctgccttctctttttaaaattttatttatttatttacttatttagagacagggtctcactctgtcgcccatactggagtgcagtggtgccatcacaggtcactgcagcttcaacttccccagttcaagtgatccttctgcctcagtctcccaaagtgctggcattacaggtgtgagccactgtgcctggcctttgccttctctttatcaccatctaatcatctcttaatttctgctgctaccagtctcttgaaactcctgtcttgaaggtcatggatttccatgtcagccaaatcaaagtgacttcttagttctcatcttctggatgtcctcattatcacttaccacttttgacaatcccttggggagcttttgagttgagaattcaaattatttgcttttatatcattgtacctcactgcaagtcttttctcttcctcttgggtcagaagactgattaatttacgaaagcattctgggatgcatcttatttcctccaaatgaaacacttacaatttaaaaaaaaactgtttttgaatagatgactggagtttgaggcaagaatctaatgatacatttctaattaaacaaaaacattgacaacctcttccttgatttgctgagtaggactttgtgtagaagtttaaatttttattgcatcctactatgaagcactaacatgaccaaatataaacttgacactgaaggattatcttagtaattattgtaacacttatgcttgtgtgagaccagacaaataaagagatttaggcataatgaaaatcagttgaagagtgaattttgccccttttaaaaatttttctacttgttctgatacttcagaaggagttagaaaaaataagaatatgaagaatatgcttgttgaagcaagtgatttagatttactcagcctaatggtaacagagaaaggaagaaaaaaataggaacaattcttggatggctactgagcacagctttgctaagggtaaataaacagtgaaaaaatctttaaaataaattgcatttcaaatttatagaatcctttggaaatcatttacaagatgaggtaaaataccaaaattgtggatttgtaaacagaatcataggccaagactgacatatcccttcagatttagctccagctcatttaaatgacttgcctaaggccgtgtaagtggctattagctgaacagtattaaactcaagagttcctggctattaatttctctgcttttttccaggtttttggagtaggtgagttttcaaggaggaaataagaatgatttaattttcttaatattatttatgtgataccttttctaagatggatatttccgggaatttgacagataaccctgcattttagtaagacgttactactactgatgtgtttctaaaatggactgtctttctgaagtggactttctgattcagtctttctagataaagttgttgttttagtgccttgctatgcttagccttcctggaatctctacttacccatagtttttatcttgtatggaacctcagagtaggcatttgagctgcttgtttcactctgatctagacgagttgcctgtagccaacttcctgttaaaagtctctgcctttcactgaggtcattttttagacctcacagttgtatttgaaacatagcaactgtttgcctcagctgccatggttacacatgaaacaagctctaaataatcagaagtctggcctaagtgagtcaagttcatgctagtaacggatttttcactgcttccctttcaatatgtgagtcataaggaggcagatttcattctgtgaagggaaaggattaatgataaagtcagttaacaattggaatgggctcttatcaccagaagtgtgctagtggacactagatgactgtctttcagggatgttgtaccaggaacttctgcaggtggttggattacatggtctcaaagctgctgtgaatttactgagagagttaaattatcaaatttcagttacctttacgttcatgtagaatcactatcatcttagaagaggatagggaagagatttaggcttctttccagatacactgttgttttgtttgtgatcttaagacactttacttgaatctcaatttccaattatttaaaatcagaggccaggcctggtggttcacacctataatcccagcactttgggaggctgagatgggtggatcatttgagcccagggatttaagaccagcctggccaacatggtgaaaccctgtctctaccaaaaatacaaaaaattagctgggcgtggtggtgcacccctgtaatcccagctactcaggaggctgaggcgggagaatcgcttgaacctgggaggcagaggttgcaatgagccgagatcatgccactgcactccagcctgggcgacacagtgagactctgtctcaaaaataaaaataggctgggtgcggtgactcacgcctgtaatcccaacactttgggaggccgaggcaggcggatcacaaggtcaggagttcgagacctgcctgaccaacatggtgataccccatctctactaaaaatacaaaatttagctgcgcgtggtggcgcgcacctgtaatcccagctactcaggagtctgaggcaggagaattgttggaacctggaggcagaggttgcagtaagtaaaccaagattatgcctctgcacatcagctgggtgacagagtgagactctgtctaaaaaaaaataataataaataaagtaaaatcagaatactattactgatattctactatatctgtatgaagaaatatttagattttcaaagaacaagtattgtatgtagtttgatatttccagtgaaattatttttaagtgattatgcatccagcagatatttattaagtacttactaagtttgaaacattgttagatgctatgagggatacagaaccactgtaaagaatggatactctaatgatccccattttacagatgagaaaactaagcctcagaaaagctaagtaacttctctgaaactgagcagctgttaagtagcaggagcagactttaacctaagtctgtctgaccacaaggcctgtgctctcacccgcttcttcactgccttattttactatgtgggtctaattataaggttttatgcttatctagaaatatgagagtatatgcttacaacgtgttcttcacttttttacttcacagatatgtcacagatctaagcagcagggatttaattactgtacatcagccatttcctctccattgacaaaatccatctcattaatgacaatcagccatcctggattggacagtgagtatactactttttaaaaaaattaaatatattaaatcttaaccactcttcctattatttttctcactttaaggccccataacattacctgccaaaatttgcttactacttctttgagtgaatggctcagcacttaaacagaaaaggtggcatagagtttatcttgagatcttcttccttttacctaaaaatatccctaatacattaagtttattgtatttgtgggcatgaatctgacacactttttaaaatttttttattttgaaataattttagacttgaaaaatagttacaaataatattcactggggaaaaaattgcaaaaatagtacaaagtattcccatgtattcttcacgtccagtcctcaaatgttagaatacttgtttcgccagcctctctccctctctttatcactcccctaaagattttttctgaaacacttgagagaataagttatatccataactctcctttacctctaatttagtgtatatttcctaaaaacaaagatattgtcttatattaccatagtatatgggtaccatatactggccttctctggctactgagtgctagcattagtatataagagtaccttatactcttatatactgtggtagtactgtattacagtagtctaattatccaaatcaggaaattaatatcgataaaattgtgttatctagtatgtacaccttattcagatttcaaattttctcacttatttctgggtccaagattcaatctaagaatatacattgaattaagttgtcatatctctttagtccactttaatctaaaaagttcctcagttgatctctgtcttccataaacttgtcagtggagaaacctcgcacagtaactgacctgagcttttcaacaatgtcaagctcaagaaggacaaagcaagactgagacagagatttagttcagtgagggccagtaggattgcatctgaaaggggttagtggacctgtatgcggattcagatcaactggtgttggaagttatgtagagatgtcatggcatccataagcgcagggccttgtgatgctcaaaaacatacttggattggatcagtgttgtttgtcacaaaaaaggcaacttgttctttgagaagcctcattttttattttttaaatgttgatttttttatgagtagttgctgtgtgggatctggatataaagattaaattctcatcagagagggagtgagtgatacattatgttctttgctgaaagaccatgtgtctcggaggctgaagcaaaggaaataaacacactctcctggtgtttatggggtttcctcattgttccctgatataattcagtttaagagttggtgacagaagcagatgccctatattcatgggatgttccatctcacttcatgacttactggaatcctaatttttaaaattttcacagtggaattaagacataatggatgactctagccagacatgctgacacatgcctgtagtccagctgcttcagaggctgaggcaagaggatcatgagcccaggaggtcaaggctgcagtgagctgtgatggcaccactgcatcccagcctgggtgatagagtgagacactgcctcaaaaaaaaaaaaaaaaaaaaaaaaagagagagagagaaagacataatgggtgattctgttaacttttttcttgttttcatgtgattaatatttcaaatacaaatctagcgtatttgacaaaaggtgtctaacggagacttattttcaaagatatgtcccccagaactgtgacagaaatagcttttcctgtttttgcttgtttggatttttttttttttttaatttggctttgagttagatgtttggcttgtatagaatggaaagtacaattgaatagtttgcagtgaatttgataagccagaatgctagcactcagtagccagagaaggccaggaaggcactctaagtgagacatttcagctcagcgtcccctccttccgtgaccagcaagtgtcgtgacatagtggatattgtacttctacagcaacagataactagtaccaacagaatgtgtcccatagagagacctttttcctatattttgtgacatgctttctttccttgtggatgaaacacttcattatttttccttcacaaaacacggtgctttttgactgtgttttcagttgctatccaaacactataaataatacagctaactccccaaagcgctattctagaggttctgacacatagagcttttcttcccgttgctgagaatttttctgctcaactcacctagggaacctgattgcagtagtagactgctgtcaaaagtggagcttcaagcaagagtttattcctttcatccaaatgtaataccctcattctgatttgtagtgtacgtttcatgcaggctggaatgatagctagccccacgtaccttcctaatagcatatgctgcaacagaaggacccatcaaccttaatgtcactatttctccttagttcctcctatatacaattaaaatagtttcccacctgtatttgttattctacactagaaacataatacatcattttggaaatgttaaaattctgactaaagagaagactaaaacttgtgttaaagtgtgtgtggtatgccttaagcatcgggataactgatacttcataatttgctccaggctcaagtgttcaattccaagtcacttaaatactcagcatgattcatctatggtcatagtctccctaactgaaatagtgtcataaataaaatcctcagtgatttttaaagcctaaaatgtttggtacactcaaaatattttaactgatattttaagcacacttagtagctgtattactttgagcttgttactgaaactctctgcatcaattcaactgttaaatggggatgataatgtgatgtggcttaaatctgacttcatttgaagtccatagcatattttctgtcatataatgagcacatgctgtcattgtggagtgtgattgttcacaataaccagaacagtgccagggtccatttttctctgcccagagcttaagcaaggttaaacattgctcaccattgctaggacattgtcccttgttgtcttgcacttggctgtttattatgagtgtgcttgtttaggaacagaatgttttctaaactcatcctaatctcactgctttccagcttttacctgtgctctttttccttctaaagaaattattagtttcctcaaccacagtttatcacagctgtcagtaaaacttgagcatttctggaaatgtatttccactgagctgttgtccagaatgtcttttgttgggtcatttgctagattagaaaaacagacaaacttgtagcattatttctaagctgggatctgttttttaaaaaatctactgatgtaaaggaaaatactgaatagagagggtgactaaaatatttctgtatcactttctggggtggagagtaggcaagcagtagcttctttaggaaccacagaggacgggaaaagctgcagtgtctcctgtcttggacttcctgtcttgattcgaagggtgggatatgatgagcgtgacttgccggcaattttttagggggtcgcagtagcacaggtgctggctgtgtcatgaggcttggtgcctgggaggactgccctgagagaaacttctccatggaatgtgttcacagcatttctcctccttgcatcagagaaagattgtgtggagcctttttctcccactgtgctgggaaacatagatggtttcttgatagaacttaaaaataaattttattttcacatgtatagaattcagttattacagatgatccctttctttctttcttttttttttttttttttttttttttggggagacagaacagaatcttgctctgttgttgcccaggctggagtgcagtggcacgatcttggctcactgcaagctctgcctcccgggttcatgccattctcctgcctcaacctcccgagtagctgggactacaggtgcccgccaccacacccggctaattttttttttgcatgtttttagtagagatggggttttaccatgttagccagaatggtctcgatctcctgacctcatgatctgcccacctcggcctcccaaagtgctgggattacaggcgtgagccaccgtgcccgacccagatgatccctttctatggctgtatttttaaccttttcattgctcccacccagaagatgcttcaaataatagagaatctgcttgattgcatccctggaaacacattagtggtgataatgttgaaaggggaattggacccgttagacgttttaacttcatatgcttcttaatgagatttcattttccccttcattttgcatggtttgttacaggttgagcatccctaatttgaaagtctgaaatttctcaaaatctgaaacgttcgagcaccaacatgatgccacaagtggaaaattccacatataaggccttaacaaaattatgtaacatattatataaaattaccttagagctatgtgtataagctgtatatgaaacaaatgaatttcatgttcagatgtggttcccttccccaagatgtctcatcatatatatgcaaatattccaaaattcaaaatctgaaatacttctgaccccaagcatttcagaaggaatactctgtgtgtatcacaaagaagggcactttcccttggggttgtttttacacctttgcttatggcatgtgagtttgccaagtttcttaagcatgttgtgatgggagtagtagcttgtagttgtatggcatgcattagactatgacagctaaggccatcttgagagctgaactgtggcagttacatatctgtaccagatctttaaaaaggtaaaggatctgtgtgaccaaagatcaaggtgggcctctggaaagttaggcatcagtgctattgaggatattttatctctgttttctggatttcttctctaactatgatgggaatttactgaaatatgtatgtgtgtgtgtgtgtgtatatatatatgaatatatgtgaatatatatatatattcttagcacagttctgtttggaaaagataacattgacaaatacatcagaacaaaaatgtaatcagacttctttttgacatttttattaaattgtaagactggaaaacatgcatgttcattaaatgcatatataaatataaactttaattcaattaccttgtaaaattgaattgctctgttaccagaacatttcctttatatcatatatatgttggaaatttccatatgtcagggatactctagacactcatcacgtaagatttttccttatgatccatgattttgtgacacatgaaggagatgttcttagattctgagtaataggggcagcttattttcattttctaaatctgtttgacatttggaggcacatcagaacacacattacagtagtatcttacttttgcacaagactctgcctgagaaactagtgtgtatttgtaccaacatttctttgatctgttacttggagtagctgcaacagcaaatagtgatgtcacttagcatttatctggggtatggagtggctttcataataggtaggtacagggctttttctctcatttcatttaggacattgagattccagaaagtctgataaagggaagttcatttattaatgtgtctatccagtaaatatttgagtacctactcttttccgtacaccaggctagaccatggtaggaggggggtgaactcacaggtagggttcctttcctcaccacatttacagatgagagcaagtgaatctaatagaaaatggtaaatgcagcaacttaaacatctgatgttataggactgacagacctaaggggtcagaaggctgactaaggaaaagtaatattaaagtttggaccagaaggaaactgggaattagctgggtgaattagtatgtggaaagcaagactgaggaatttgggcctcttgcctgagggaattggaatcatttacattgattaagttggtcgaataatgattagaacacttcaggctgaccatagtgagaatgtattgggaggagagattggatcagtagaaggctttttttttttgagaaggagtctcactccatcgcccgggctggaatgtagtggcgctatctcggctcactgcaacctctgcctcccgggttcaagcacttctcctgcctcagcctcctgagtagctgggattacaggtgcccaccactatgcccagctaattttttgtatttttagtggagacggggtttcaccgtgttggccaggctagtctcaaactcctgacctcatgatttgcccacctcggcctcccaaagtgctgggattacaggcgtgagccaccacgcccagccagtagaaggcttttgcaggattcaagttacagtagtagacaatgtcctaaaccaaggcagagagcagtggcaataggggaggaatagaggttgagctggaagacaaagtgaagaagcctgagtgaagtgtgatataaggattcaggaatggtgcccaggtttccattttgattaatgagttagatgttggtaccactcactaaatgaaggaacacaggaggaggaacaggtctgcaggaaaagataagttcacttacctgcttttggagctttagctgcctgtggaacatccacccacaggtgagcagggagaggaatgagcctagatctaaacagagatccggcttccagattagaaagatgtgagtcaccagtgtgttgtatgcagatcgttgttaagaggtggagtgaattaggagatttggggtgagggagaagagagccagatataaaatcctgaggaacatcactactagatgtttttagtatacttttaaggaagagaaccccaggtatgaattgtgatcattcttattttcataatctaacaggtatgtatttattagccaaattttttagaaactgcattagaattctgtatattcagaaatggagatgagaatgtaaacaaattattacatcattcacctagacagcatttcccggaaccgcataggccattgacattatgctgtttccccatgtgctgaaggccctggcataatccgagcatgctctaatgtcttctgtgaacctccttctcagctcagcagcagatgcggccagcaaggcggatctccatcagcatctctccgctcctccttaagtctaaaactctcttttctcttggctcttcttattcgagtgatgaggaggaggagttgcatagtaagtaagcaactttggtgtccagtgactgttcttgaaggtctgaccagctcagaaaatgctgtaggcttggtactaagaaattgtatgggggcttttagcctcttgcatgccatcctttgtaagtcatttgtctttatgcttgcctttgagaattggtttggatagaacatttttttgtcttctgtatagtactaacgctgagctactggcctcctgattccagggcacaagataatctttctagcacacagataccctcaaaggtgtagggggtgtgttcccatcccattgtgtactctttctaataatactgtatgctaatttcacaaaactttttatttgacaatgtaaattttattttccttgttgtgttgttctgtctcatgggacagatatctagatgttcatctgtggtgtttaaaagctattgttacactttttttcttctccttttcagaccatttctttaaaaatacctttcctttaagattagaccccatgaattagagggagggagttatatacgttttgtgagtgtgtgttgtgttttttttttttttttgagatggagatggagtctcactctgtcgcccaggctggagtgcagtggcgcgatcttgcctcccaggttcacgccattcttctgcctcagcctcccgggtagcctcctgggtagctgggactacaggcgtccgccaccacgcccagctaattttttttgtatttttagtagagacggggtttcaccatgttatccagcatgatctcgatctcttgacctcatgatccgcctgcctcggcctcccaaagtactgggattacaggcatgagccacagcgcccagccggagttatatacgtatttatctcctactttctctctccttttgaacttttatttttacttctttggataagctgtaggcttcagatgaatacattcttacttgataatgccttgtataaaaactttacaaggtatcaattttagtaaacttggaaaagaaagaaattcccccttcatgaaaattacagtcttcaattgtgcaagatttctagaatattccaggattgcttttaatggagaaaccacttataatagaaagttaaataaaattgtttttatataactagtattatgagtctgagacaattaccatacccatatgattaggcaccctaattccctaccacttgctgattctaagtttcagcaatattaagtgtttctcaagctggcattttcacactattcttaaagggaagtgccttatgcacaataagacagtttagttaatttggttttaaatggtggccttattaaggatttggtatatttttcactaataaaagatgtttgaaaaatagacacagaataagatgatcccagttgtaatagaaggaaggttgtgaaaatccactctaactttgggtattcagaaattttcaaagctgtttcatttcagagtatttgtaataggctgggtgcagtggctcacacctctaatcccagcactttgggaggccgaggcgggcggatcacttgaggtcaggagtttgagaccagcctggccaacatgacgaaaccatgtctctactaaaacaaacaaacaaacaaattagctgggcatagtgatgggcacctgtagtcgcagttacttgggaggctgaggcaggagaatcacttgaacctgggaggcagatgttgcagtgagccgagatcatgccactacactctagcctgagtgacagagtgagatcacttcatctcaaaaacaaaattaaaaaaaaaaaatcaaagtatttgtaatataccgggaagtagccaggtcagcatggcaaataaaccaaggtcccagtcaggcacagtggctcatgcctgtaatcccagcacttttgggagactgaggtgggcggatcacgaggtcgggagttcaagaccagtctggccaacatagtgaaaccccatctctaccaaaaatacaaaaaaattagccgggtgtggttgcgggctcctgtaatcccagctattcaggaggctgaggtaggagaattgcttgaacccaggaggcggaggttgcagtggccaagatcatgccattgcactccagcccaggcgacagtgtgagactccatctcaaaaaaaaaacaacaacaaaaaaccaaggtcctgctaatacagaattatgatcctataacagcactggtcattcagttaatccgacacaatggaaccctaaaaatacggaagcttgcagaaactttttgaatcaagtatcttctcaaaatgtgttccttaaattcaaaactactagtaagaattatgtgtgggcagggagaaccaaaagaagggaggggttggttcatggccaaatattagtaaatttaggaaactctgggttaagcaggtttaaaatgctaacgttgtgttacgttgtggattttcaaggcagtgttcaatatactgtttctcccaaatgtattaactagaaaaccacaatatgtgcagcactgtatacaacatttcatgaaactggtgttccacggaacacactctgaaaaatatcaactgtgtccatccagtagttccaccctgaagttcctggctgtagtataaatctgcaggttatttcatgccttgaaagataatctagttgaaatatattatttacccacaataatactttgcaggctaactttaatgacaagtttcgtttcgtttcatttattttgtccataattttgtcatggaagtagcattggttgttttctacccttaggtgctctgaaaacttgatgatactttaggaatttcagaggcattggtggattaattactgtgttcagaaccacatctaaaaggtcatcataacttaactaaaatttttagcagtggaaaagttgaaaatattataggagtcatagattctcctagtactcaatcacatatgtgttcagtctttaatttattccacacatatctgctggaagcttatgattggccctgctttgtgttggttggtatttttctgcattatgaattttatttttatttagttcatattactagggtggtaacttactaggtaattgcttaaatgtatagtagaatccaggcaagcttagaaaatttaatgctgctcctatcactgaagtttccttgggcagaaaaggttttaaaaccactgatttaaactatcctcttgattttttttttaagtacactaatgcatcataagattaaaatgctgatattttacacctagattatgcagaacctggggatggatcccagatattcttatgctgctaatctttccctcttacctggctgttgttaccatgtgttgtaagtgaaatgaacagaagaagaaccctaaactgggaaaaaggaaaaaaatacggaaggcaatcttttgaagacttagaatttgttttaaggtttcttatgtattattcctacctgttggcaatttaaatttagccaggtgcaatggctcacccctgtaatcccagcactttgggaagcggagacaggaggattgcctgagcccaggggttcaagaccagcctgggcaacatggcgagtccctgtttctaaaaaaaatttgtaacaataatagataaaaataataactacagttttggatttctgttcagaatctggaacagtttgagagttgaagagtttcaaatgcgggtaatctgggagtttttttgtttgtttttgtttttgagatggaatctcgctctgttacccaggctggagtgcagtggcgcaatctcggctcactgcaacctcgacctcctgggttcaagcaattctcctgcctcagcctcccgagtagctgggactacaggcatgcgccaccacgcctggccaatttgtgtatttttagtagagaaggggtttcaccatgttggtcagcctggtcttaaactcctgacctcaagtgatctgcctgcctctgcctcccaaagtgttgggattacaggcatgagccaccgcgcctggcccaaatgctggtagtctggtagtagaacatcttcaaatctctatcagattaaagttttgcttacagtaatctcagagatccttgaaaccaacctcaaggaaaaaggaaggtgttttgtctaaatcgttaaaatagtgttacagagtaacctttgtttccctggaatatacatggaaatagttctataactgatgtcctgaaaattgaaaatcatttatcactgtgactgaggtcttgctctcatctaagtcttcagtaactcaatctttattaacatgtggtagataaaaataataatattccttctattttttcttcatattgccctatctgacatagtcttagaattttaatgacctgcggcagtttatggtccagtggttgtggaaggaagaagtacgcatctgcctcattcatttttatctctattagcctggaaaggactttgccatctgttttatctccctcatttcacagatgaggaaatgaaatccaaaggtctcatcccaaattagtgacagggcgaagacttgataagccagctctgatgctctttcctgtttgctaatctatttctagcaattctcatgaaaatattagagatgagctagatcttatagaaacatataaaagcagtattaacggataaaatatgacatttaatttcctattctatattcttcctatgatgtcatctcagaaggatggtttgtgcaaactgaagattgataagaactggaattaaacatgcttcatatgtgtttaagcattagaaaaagttatttggagtctttttagttacttgaatcctggattaaacttattttcttcatgagaaattcactacctacttctggttctaatttgagggtttcaagtttaatttttccttctttcaaacctttagaaggaggaggtaccatgtgctgactttcacacgctgtttttgctttagctgtgtcattgtgaatttataaatattctacccggcatcagtgttaaattttttggttctaactttttttctgccttgttttctagattcacggcccttccacagtaccttccacaataccagtgctaatctgactgagaggtactataaatttgttactcctttttccagaaataaaatgaagaaaatttaaaatctcttaggccatttaattacgtaaactaagttaattgagcttattgggttcttctttgagtgataaacttggaataatgattaaaagtggttttgtcatgaaggctataccttaaagttaatgtcttcagtagttttattaattatactgtcctcatgataaaaattggttgtatttattgatgtgagggtacactattatttgactttatgaacttgtgcaccctttgcttatgggatttttaattcctaaatctaacagtctaaacaacattttgtttcatattagtgtctgtgtgtgtgtgcaatttataatagtcttagctattttaagctttaaagctgttttcttctgtatacatgtaaatgatacatagctctgtcgaagtaaacgaattgattcttttttttttcttttgagacagagtttcgctcttgttgcccaggctggagtgcaatggcgcgatcttggctcactgcaacctctgcctcccaggttcaagccattctcctgcctcagcctcctgagtggctgggatgacaggcatgcgccaccatgcccagctaattttgtatttttagtagggatggggtttctccatgttggtcaggcaggtctcaaactcccgacctcaggtgatccatctgcctcagcttcccaaagtgctgggattacaggcgtgaaattgattctttacttgacagcaagcaaaagatttctgttctgactcattatttttatttaggttttcatgcttatgagatagaatattctacttgaagtttaattggggttcctatggctgccctgcagttttttctgagttgccttctttttcacagaggcatcagttatgattctgatttagaacccttgcaatgaatgcttctctttgcactgcttttatagcttattctttctcctttctacagcagtggttttcataccatttcccccttatcttaaaaacagactgctgtattttgtaaacaatgcatatataaataaactgactgttgacaggaccccttgtggtgctgcttctgcctgccacctgccctctcacagaggccctagaggcaatcactgctgttctgtgggaaatgtctaaaatattttagaacacctaagcaaagtagtataaatggatgccttttctatataacggattgtttatttgaatgcccagctgctcttttgtttgtttgtttgttttgagacagagtcccactgtgtcacccaggctggagtgcactggcacaaacaatctcggctcactgcaccctccacctcccgggttcaagcgattttcctgcctcagcttcccgggtagctgggactacaggcgcgtgccaccacacctggctaatttttgtattttttagtagagacggggtttcaccatgttggcgaggctggtcttgaactcctgacctcgtgatccgcccacctcggcctcccaaagtgctgggattacaggtgtgagcaccgcacctgccccaaatgcccagcatttaagaaaatcaaccattgcaaattacctaagttagaacatgcccatcttggatggacttagattttatgtaggtttcttgaacaggtagatcactgaatctacataaaactcctaaaattgatctttcaacactgtgcctcaattctgtctgctcctcagtaagttccctcctaaaattgaacctagctgcatggaccagtccacagtcctgattgtcccgtgtgccaaaggctagaaaaaagttgtgatctctaccgttaaggaacttggatatgtggtcagtcataagattccttggtttgcaactcctattaacaagtaccctgtcattctgctacatatatgggtttcctttcaagcacccatttgttacaaaggagtttgtagattgaatgctattgtagatgaatagattccatataaaataattactgaataattgacaggctctttttaacatgaggtcactgaaaatccataattaaaacattaaaaatgggccaggcggtagctcacgcctgtaatccaagcactttgggaggctgaggtgggaggattgtgtgaagccaggagttcaaaatcagcctgggcaacatagcaagaccccatctctacaaaaaaatttgaaaaatagccaggcgtggtggcatgtgcctttagtcccagcttactctagaggctgaggcaggaagattgcgtgagctcaggagttcaaggctgcagtgagctatcatcacaccactcagagcaagactgtctccaaaacagacaagtgaacaagaaaacattagtgacggatctaaggaaacttagccaagttttgataacagaacctgggcgttgtggcatactctataaaaagccattcagcagccttcatctaccttttattctgcttcacttttatttaacttctgtagccctttaaaaaaaatcaatcttcttgtttttatttagtataacagaagagaactataatttcctgccacatagcccctccaagaaagattctgaatggaagagtggaacaaaagtcagtcgtacattcagctacatcaagaataaaatgtctagcagcaagaagagcaaagtgagtatcactgtgggcattgcttgtgatcacctcagtaggatcctgtcacagcctgcattcacaccaaaactggttaaatcatggggacataaatggaaataaattcaggattactctccgaaatcgcctaatatttaaaggaaaataataagaagaaaaatagcaagaagtggaactaccagttactgagttttcactatatgctaagtgctttccatatattatttaaccctttcaacaaccctgtcaggtaggtgttatctctcttttctaaaagtgatgtaccttaccgaggatactcctctaatgtgaagaagtagttcaaaccagatctctttggtttcaaatcccatactcttaaaccacagtgcttaaatctgtaatatcagtttaaatgcaacagaaggattttatgcaaagatcaaaggattgaaaatatttatatttggctttagagggaaggattatcccacagaagattacaagaacttttaagactaatatgatttcttagatctatttctaattaggagcatttggaatatattctcttagtgattaagagattaaataaatgtttaaaccgtgtgtgtgtgtgtgtgtgtgtgtgtgtctgtgtgtgtgtgtgtgtaaggctccactgtatcacccaggctggagcacagtggcgtgaccatagctcactgcagtcttgaactgccaggcttaagcagtttcctgcctcgcaccgtagcctcccgagtagccagggctacagtcatgttgtgccatcgtgctgagctatgtttaaatttgtttgtaaagatgaagtcttgctgttgtgtctaggccggtctaatgccttacctcaaacactcttctcgctgcaggcttccgaagccctgggtgtgatccaccgtgcccagcctaaagtaacattttttatctaattatttttcacatgctcattatggaaatcttcaaaatctaaaagtaaaagaatgaaaatctcctggaataaccccgcttagagataactacacttaatgttttggtttatatatttctaatcttttttaaaaatgtattttcaaaagaaagggagaaaagaagttcactttcttatactgattcccagtgctaaaccaaaactgattccatttcaagtccgtggggaaaaacttttcgcctctcacaccctgttcatctacccacaacaccctctaacaaaataaagacataagtaaataaaaatttgaaatcagttaaggaactcttgcaaggaatcactgtgtgtgtgtgtgtgtgtgtatgtgtgtgtgtgcacgtgcatgcatgtgtgtgtgtgtgtggtatatacatgtacatacagatatatacacacgtagatacatgcatatttagaagtaagggaataaacaaacattgaattcaagaatattgtcataaaagggcattgcctcctccctcacaaaacaaggtgcactaagcttctcaagccctcacttcagtgggctgatggaaatatagccaaagtattttaccatgttttgtaagatctcttggtttagcaaatacattcaaagaaatttttccaccaaacgtgccacaagaattgtgttttcatttctcctgtgcaagtacagaatggagagaaagtaggcaatcagggagagatgcaaagagtctagcaaattatttctagcataatcacacatttaacttcagactcagccttgttttataattccaaaaaaaaaaaaaatgaaggtcaaagaatactgctttaccagtattctacgtatttacatattggcagccaggcttaaaatagagccttaccttttttacttaccactgccggcttggatactagttggtatcaacaaaagaaaatccccttggacagagcaatataaattagccaagtattattaaatgctttgtatagtcttagcattccactaggtgttaacaggcacctaagagaactaaagctcatagtcctgaccttgaaaaactttatgatctagtttggatgaattcaaaatgttttcattgttttttattttgctttaaaactactgaatcttgtcttcaaacaagcttttcgtggaagaccaataaataagtggagattccccctttctagccatctccccaatgtcatggagttttaggacagagcagtgaatgtaccactcatctcatggataaggtaaaacatacacatgataggaaaaaaaacaacgtaagatggaatttagaaactggaccctgacctttaaaaaagtctcagccctcagcctagcctccttattttacaaactgaggcacagagatgtatgcttcatgtcacacaacctcacacaacctcacacaacctcctgttatctgacttccaggaagtagtactcatcattttgtgtttaaacaaaatgttactatacagcgtaatttttttcttttaacttttttaatctgaaaggactggagtttgctaggaggagatgagcagaaaggacaggagaaaacatattttgtgttagaccgaaatctgtgatcactggtagaaacttttagtatcagttgacctcttgtctctgatcatctcctttgtcaaaatgacaacacttttttgcaattgagattggttcctctttcagacttggcttcaagatttgatctcttggggtcgtgctgtctttagcagtggaaactcaaaaaattacaaatttgtaaccctgaattgtagtccatttcccattaccaagtgtttagagtgccctagtggcaactgtaagtcaccttttatagtgaggtgttactagctcacttttaaataaaattggaacagcttggcttttgtcaatgtagcaaaagatgattttttaaaaggtgggggtggggcacagtggtacacacctgtaatctcagtactttgaggctgagatgagaagatcacttgagaccaggagttcaaggtcagcctgggcagtatagtgagacctcatctctacaaaaaaattgtaaaattagctgggcgtagtggcacacacctgtagtcctagctactcaggaggctgaggcaagaggatcacttgagccgaggagttcaaggctgcagtacgctgtgtgcactccagcctgggcaatggagcaagaccctgtctcttaaaaaaaaaaaaaaaaaagagagagagaggaaagaaataggggaaatagtaaagcagtatattttgtgttaaataccctcactctgctatgtatctgcatagcattttaccatgcagaagtactgtattttctaaatggtaacataaaaattaatgaatattaaattttcttaacatagtgatgctaactctaatcttgttcttaactattgaataatgttacttctccataatgttaacaaattgaaagtgctactatggatattgacactgatttttctgtgaaaatgataaattttcagtttttaaaaattattttttaaatagatgctgtgagagaccgtctgatccaattgttttattaatctaccatacaataaaactagacctacatcttttaaaggaaaaatttaagcatctaccgaatataatattaaaatgccacctgtaactcttagagaagtgtctaaggattatttgaaaatgtctgctttccttttgcatgatatatatatctttatgaaaataggttatagtgattaacctagatatattccattcagttgtataattgtgatgataaacagttcttaaacatgtccaaagaagccaaaagccagtaggcagtaaactgttcacattcctaggagggtaacatattttgtctggatcactgggttttgtatataaacttaagaaattgagtccttgatcctatgtccttttgagaattatcaccgactggcataagtgattagattagataaatatattgaatgtgtttgtggaagatgagaggggatgctaaacaggaagtatagcaggaagactggcagtttctgcttttgtcttagtatctttgagagatagtgctgtttcctgctaagtaattttgcgtgttacagagtatttaaacactcatatgcatggtgttcgagttcacaaagggagtgtggaatgaccctcttcaaaccatcctatcacactggttttcttttttctaaaccacagttacttttgcaccaacctaatactaagctttcctctttgtagacaaacaagaggtggttagaaatgttttagacaaatctatttgatttgaagtaggtatttttgagtgcacaggttaaattcctgcacagctgcaagtatactacatgactttgtaacaggacattcagttacagctcctaggtcctgtggtctgtataaaaaagagctgtacccataggcctttcagaagtgcctcctagagtagtgtttacaaagacttaattttaaatgtaattctcattccttctttgattaaagatctgtaacatgacagttgtttgatcatatcatgttttcacagttgtccagagtgttctttttattgtaattacatgtataaaggggtatttttggaaaagtgaagaatcacctttgatagtgtcctagtgcagttgttacctgcatctatccctgttaaataccgttagcctgtttctccagcacacagctaaagcattttgccagttgttaaacatggaaaagtcaaacttcagaaaataactagtcaccactttacaccaggcaacttcactgaaaagttttcttatgaaactcactgcattttacaaaatgaggagtctattttaaaataggtaagatgtgttccttaacttcccgtgtaaaaacttggcctcaaaccttgctagagttcttatattgctgcttaagcactgtccacacacactgtttttggggggagtgaggtctcgtttcatttcctgtatcctttgtaacaagggttgttggctttagcagcagcattcaaacagttaagactgtcttaaggaaacaagcagcctcagccctccctccttccctttctcagccagtctctggcttcctcttacgatttcactaatggcagctcaaagctgctgagctctgccctgacggcatgcgcccccgcttctgtgagagcacgcttcctggcatgggggtcgaatcatgtcgataaaatgggctcggtttcatgaagtaccccacataacagtgagattcataggaccaaagcatggggaggtaagagcctgacttctttaaagcactaaattctagtaaacacagaaagagccagtggagttggttgttttgttttgtttccatcctgggaagaactaatttggattgttgcaaagggaagctatttcttatttattcaggtttgaagagcattgcaaggcttgagaggataagctggttgccataaaaagattttttaaacgattgaagtataatttaactttcctgagcaaaaaaatcagatgcttttccatttaacattttatgcatggaaaaacctttagcaaaatttagttaaaagaaagaaattatttgaaaaaacccaaatttagttgttgattattactaaagttttatgtactttagtgattaccaattttcactcagaacagcttcctgttttgtaaagtgaaggagtttttctcccttcctctctcattattttttatagttcaaaagtgtagtaatttggctcttagatgttcattatatgtatttgattaacaaaagacttcacatgaatcatagatctagcaattatttaccatttcattacagtggttgggttctgaacagaaagtcagaagacctgggttcccattttgactgtgctgatcatctgttgtgtgaccttttgcaagtcaaccaacctctccagtccctggcagcatagtgcagtgtatgagagctgagctttacagtcagccagatctgaatcttaatttcagcttgagcagttattggcgtgtggcctcaaatgcattattaaacatctctaagcttcaatctcttcagatgtaaaatggagataatacctagtattatcattgggttgttgtgagaaaatacatgtaaattgcttactacagtgcttagcacgtagtaactgttcagatttttagctgttatttattatctttatcctctacgttgtaaaatgggaagcataatgctcaccctgcccacttcagagttattgagtcagacgaaatgatgtatgtagaagacattgattcaaaatgttaaggcatttagtagttgtcatgatcactgacttgggacacccattttcctggaatttttttaggacataacaatggtattgacaataggtaaaacctcttaccttgtgaatggtaggtctttgtagtccagttggtttgaaaggaaattatttcattgatactgataagccagccaagtactctgccaaacagtgcttctaaaggaccttttatggagagcatggttatatccccatggtcctggcctcctaaggatggtgtccacctgaaatgtccctgactgctttagatatttcattaaggacccaccactcatcagtagttcttcaagttttcagtgtttgaattcctttccgttcctcttcatgactgtgtaagctttgacaacagcctctcttagattgaggcttgatgtcatatgagtcctctgctttcagtctgtctctagaacatttctgacattcctgcagtattcttaaggtgacatggccaacttaatctggcacttagagctcctgactctcagcccagtgcccccactgttcacccagtctcatgtctcatttgctggtgtcccctgtgctttgtacctagcccggttttggcctgctcagtaagtagaagcacctgggcagtggctgggcacacaggaagcacaagatgagtatcagtttctgttgccactctgacaagtgagggaagaccacaggaaagaaaggagcttcacaaaagaggtcagagagcacggcgtaggaagcttatctttccaacctagggacactgcctgcttttcctgccttcctgcacccctaggtactcagggtagaggagtgagctactaagccttgggacttcctttccctggaaccccatttttttaaaggaagtgaccctgttggtatctagcttgaggaacaacaaaggtggtttttgagaaaaattattaacaaggctccttcctgtcatccgtgcattctcctatcctccctgccctgcaccgttgtcctttagccactccccaatttcttctatcttccctgctcacatcaaaacttcctttcccttactgcaagcaatacctttctgtgttggcttaggagaataatgagctaatgaaactcatttccagtaaattatgagtaattaataatattgctaagcattattgtgtattcactgtgtgccaggcactgtgcaaaatgctttagaaatgtattatctcacctaattgtcatatgttttaaaaaacatatgagatgggtacttttgtgattactcccatttgacaaatgagaaaactaaggctcagagaaataatttacctagggtcacgctattactgagtagtagtagtggtggtggtggtgatggtggtggtggtggtggtggcagtagtggtagtagtggtagtagtacctgaatctgaaccgaggtctggtaccatcgtccgtattcttaaccactgtacggttttccagcctccccttcttatcagtctcctcttgccggtttgaaaattagggcaaagttaatatttacaaaccttaaaattctaattagcagaaactgaaaatgtatatgtggggcatatttaatatttctaactagagtaaaggaggagactttatacatactccgtcacttagggatatgcaattgatgtgagaaagagaggagcctcggtaatttttcatgccacccaggcatctttttttccctcaggctgatcccagaattgctgccacccttttttctgccctctgcctaaagctggccctaaacccatgactctcttcctgtgtggactgtgctgtagcttgctgaggaagggctgtactgaggtgtcagaagcctccttgcagtgctggtccttgggtattgtgtctgttggtagaagtaaccaatgaataagccactgccagaactgttccgcctgcccagttttcgtgtgaattttctaatgtagcttgcgtgccaacgccttaatttaaaaaaacaaaacaaaacactttgcccagaactttgtttctcactcctttccaaaatagtcaccagctgttgttaaccacatgccatctgggtgcccaggtaaggagaaagccctccagtgttcaattaactgtggattattttcttttcttcggcaggaaaaggaaaaagaaaaagataagattaaggagaaggagaaagattctaaagacaaggagaaagataagaagactgtcaacgggcacactttcagttccattcctgttgtgggtcccatcagctgtagccagtgtatgaagcccttcaccaacaaagatgcctatacttgtgcaagtaagagacatgcttcttcctctcgtaagatggaactctcttggctcaagaaagctcatttcttgtttcctgtccccactcattatctgttcctcatttatgtggagaagtaaccctttttatatctttctttagacatgataaaagaaagaaattctagatgtataacatacagcctatatttttttcagacagccccaatttcaaatacagtcaagttaagatggttcagcctagctttttaactttacagtggttcaaaagcaatacacgttcagtagaaactgtactttgagtgctggtacactcatttcgtttttcacatttagtgcagtattcaataaattacatgagatagtcaacactttatcataaaactggctttgtgctagataattttggccaactatagtctaatgtaagtgttttgagcatgtttaagataggccaggctaaactatgatgtccagaaggttaggtgtatttaaatgcatttttgacttaatagtattttcaatttaccatgggtttatgtggatgtagcctcattgaaaggatgaggagcatctgcactctgttctatgatctctaaaccactgcacgttttaaaagtctgtgtcagcatcaaaattatccataaccccaaaccctaaagctactcagtggtcttctgttagatcatatgtgctcatttttattctattactttggtatatgcttcagccattaccaacattaagccatagtgacggccaagggagagcacctccgtgctcagggacattctgtgctgacctgctgaaagccaagtctgctaactgagcattgttcctggttttgataagacactctcaggcaggagttgcttaactttttctgtacaagaccagataaaaagtatcttaggcatcgtgacccacatggtctctgtcacaattcttgaactctgcagttgcagtgcaaaagcagccgtaagcaatacataaaccaatgagtgtgattccaataaaacttcacttatggatactgaaatttgaatttcataaaatttttgttatgtaatagttttttgatttttaaaaactatttaaaatgtaaaaattattcttagctcatgggctatacaaaaataggcttcaagccacatttagcccacagaccataatttgcacgtttttgctgtaaggcagtgcatctcaaaattttgtcagtgcacagatcaaaagtagtatttgtagagcataccagggtaaatcaaggaggctgcttctggtcagaggtgacagtctggagttccagccagtccagggccagtccagtcacccggaaggctgaggtaattaacatgatactatatctataaccaattcagatgttatagtgacgaattcagatgtcaaggagcaactctcagaccatgatgtcctgaaatcttgttttcagtcatttatgttggatatcccaagtaatttcttactaaaaatagttaacttactgaaatctgattttttttctttttttttttgagacagggtctcactagttgcccaggctaagtcttgacctcctgacatcaagtgatcttctggctcagccagcctcctgagtagctggtattaggcatgcaccactgtgcctggtagaaatttgaaatgtttaaaagtgtatttgggccaggcgtggtggctcacgactataatcatagcactttgggaggccgaggtgagcggatcacctgaagtcagaaattcgaaaccagcctggccaacatggcgaaaccccgtctctactaaaaatacaaagttagctgggctttgtgacacgtgcctgtaacctcaactactcgggaggctgaggcaggagaattgcttgaacttgggaaggggaggttgcagtgagctgagatcgtgccattgcactccagcctgggcaacagagtgagactccatctcaaaaaaacacacacaaaaaaacgtgtatttggacagattggaagttacttctgtgatgattttcactcactttcttgcttggaagaggaggagtggagttacagctagcacacagcctgtctaatctgtgctacagttcctgtgactttttgatatgactgactttatgacacacattcatgtaaaatgatttttattggatgttacacccccaaagtagtcagcaacactatttgttttactgtcctattttttcaaaagtaaccaaaaaccatgagagctctcacccgaatcctcatgcatccctgtgggcagagatcacacacattaatgtcatccttcatttgtgacttaccagaccattgagagccactaccacataataataatttcatgtaacctctaggaaacaagagactgtcactgttcagtattcctccagtgtttattttggaacccaggttctaataggactcttctgggacaccagtcggaggtctatagtttagttttttagccattggacacagttagcttcttagtactggaataacctggttgcctagagcagtaatcaccaagcattttatagcatgttcacctattattaaaacatttttagcatactcacataggatacatacataacataaaaattacatacaagtcctactgtgccatactttccaagagctcattctaaaaataagtctcagaattgccattttcttgttttctggttagttattagtatgattagtattgtctttgattcatgacttctttgaaggaatttgtgtaactctcatcattttcatttgattttagtggaaaccaggtaatataatccataagcccactttattggatacctgtatgtttccattcatcacaacatgctgaaagtaaacaaatgtggattatgcatgcccagcccatctcctgagtgaagaataccccgctcccttaagaaacctctagtgtcacatataaagtgaggctgcctaacataaagactgagcgaggcacccacttatcaattagacattaactcaatttttcttctacgttaaggagtcattttaaataagagctgtaaaatcttcctcctgtgttccaagggattgttttttacatccctccttgcagtgtgccagttcttcttttggagagcactgatctcagaaaaacgggaagaggctgtatttcttgattggcagtatgaaattaatattcagggaacttcatcagtaaagcagactagatacctgccttctgctataaaatataaaatgctaaataaaatctattttttaaaaaattaatacatagctgaacctgccaaatagaaaattcctgagggaactcagagcagtaaagagcatgccccctcatttggggtcaagatatgcggcctcagggtatgtagtgggagctgggactgagacccctgtataagaaatgctgttttaagactaacatccatgatgaagggccttggaaaattctacccagtggccttcagaagcagaaaggaaccttacagtctccccaggtccctgagtgagaattgatgaatctggagtccaagtttacaccgtctgtatgtgctagaacttcaggctaagaaactttcacaagaggttacatgaaattccagtttaggaatgacagatccttgagggacccagcctgtagcagatgtagaactgctccattgggttaggttgacaaatcagtatacccaaggctacggcaggaggaataaaatcctatgaagccgagctcatgataaaagatacatagatgccacataaggaagtaaaccaccatgaggaagaattaggggatgtacaagcaagagatgttgaaaatcactaaaaggggccgggcgcagtggctcacgcctgtaatcccagcactttgggaggctgaggtgggtggatcacaaggtcaggagttcaagaccagcctgaccaacatggtgaaaccccgtctctactaaaaatacaaaaattagccaggcttggtggcgtgcgcctgtaatcccagctattcagtaggctgaggcaggagaatctcttgaacccgggaggcggaggttgcagtgagctgaggtcgcgccactgcactccagtctgggtgacatagcgagactccatctcaaaaaaagaaagaaaattactaaaaggatgaaacgaatagaatctataatggaagaaaaagacgtaacaactaatgggtagatttaaaaacaactgagtaaaatttaaagcatggaaatagtcattgaaaggtattcatggattttttcaaatatttcagcatattgtcctgatttataattgtttataaaggaataagatggcttctactctgttgtctgcattagtaaggggagagcttcagtctagaaagtcttaatgacttcacactggatttgttttttacatttaatcataaataattgtacccttaagtccttgatcttatatgaagtcaatcaacaaagttcatttgactgaattctgcaagctactgtgtttgatatgtgattcatacaaaagcagtttgtcaacaaatatttattgaatatcaatatgagtcaggcacccacagtggcttaaaaaaaggaattctaaaatgatccttcgtacttatttattgtgaacttgtttatattctggaaaaattgaaagcaatttaaatatccatccataaaatatagtatattttgtatagtatatagatggataggctgataataaagagagaatataagggccaggcacggtgcctcatgcctgtaatcccagcactttaggaggctgaggctggcggatcacttgaggtcaggagttggaaaccagctggccaatgcggtgaaaccccatctctactaaaatacaaaagttagtcgggcatggtggcagtgcctgtaatcccagctacttgggaggctgaggcaggagaattgcttgaacttgggagacagaggttgcagtgagccgagattgagccactacactccagtctgggtgacagagcaagactctgtctccaaaaaaaaaaaaaaaaaggagagagagaatataggacagatcagaggttgccaaactttttctgcaaaggaaccaatggtatgttaggctttgcagcccatcaggtctttgtcatgactactggactctgtccttgtagcacaaaagcaaccatagacgatggatgtgactgtgttccaataaaaatttatttacaggcctggcacggtggctcatgcctgtaatcccagcactttgggaggcctaggcaggtagatcacttgaggtcaggagtttgagaccagcctggccaacatggtgaaaccccgtctctactaaaaatacagaaatcagctgggcatggtggtgcacgcctgtaatcccagctacttgggaggctgaggcaggagaatcactcgaacccaggaggcagaggttgcagtgagccgagatcgagcccctgcactccagcctgggaaacagagcgagaccttgtctcaaaaaaaaaaaaaaaaaaaaaaaaaaatttacaaatacaggctgtgggcctaattcagcccaaggaccatagtgtgccaagccctgggagagatttgcaggtgcagacagagctctccaagacattttgatgagttggaaagtcagtaaatagaacaatatatacagcatgatcctagtttatggaaaacaaacagtttatataaatttacaaaaatatgccagggatggtggctcacagctgtaatccctgcactttgggaggctgagacgggcagaacacctgaggtcaggagttcaagaccaggctgggcaacatggtgaaaccccatctctactaaaaaacaaaaaattagctgggcgtggtggtgcatgcctgtaatcccagctactcaggaggctgaggcaggagaatcacttgaacccaggaggcagaggttgcagtgagccaagatcacaccaccgcactttagcgtgcgcaacaagagtgaaactctatctcaaaaaaaaaaaaaattctttttacaaaaatatctgaaaggctatacaccaaactgttaacaatctgaagaaagagaaataaggagaaaaggagttgaagaggactctttattttattcttttagattgtttgaatttttagagaatgtacttacatattatttgtatgtctaaaaacaaaatgtaaatattggaccactgatagtttcaaaggtttttctagttatttatcagctgatctctgatgaaggcacaaaataagttggtatttgatttgagaatttaatggacaaagcagaattactaccagaacagagtaagcttataagccttgaggagagttgttctaccactgttattgatagcaccagcttgaatcagaagtagtatagttgatctaccaactctcagttctggattgtgatgtgaaacattatcaggagatttaaggttgaaagttatagacagtctttttgaagacccaaagaatcttgtgctatagaggacaatagatttaagaaccgttggcttatggttataatgagtggctgtacctttccatgactagctccagataattttgcaattttaagttcaggctaaaagaagttgtctaatatatgccagtgtatatttagccttgtattgccattgacttgtgtatatacattatttctaggttacaaatagttgaaatttgccctctttggctatattaagtctttgtctacattagactatcactcagaattaaacctgtaactggcatataataaatttatcagatagcagaaatattcagttaatgtaggagaatgcacaggcatcctaagcccatttttgctttcttgatatgtcttcctgttaaacatgatagaaattctcttttactggactccctggatgatgaagcacacatagctaggacaccacaagttattagactccttatgctatcagtgtcgtatgtgctagaaccgcctctggagagcaagatctgggttacctcttggagacttccattgcccaacgatgccagaggtacccgtggagaatcacttgtgtagggtttggtattgactggggaaaactgtaggaaaggtttgagggtctgagattctcagccacacttctgtgtagtaattagtttaatggatagggcggtagctttcaggatgtcaggtgtttggaagctccacagatttctgaatttgtgtatatttaaaactacataaaaacgtaccttcttaaaggtataattcccaaattttaacatcaacatatcagctttagctatcagcctacctattcatttgtatttttccttccatctctaattaattgaagattatactgtgattgcaaggcaagccattaaaaaaaaactgctaatattggttatttatctacatgaagaacgttaagatgttctctgtgtcatgtactcaaaattaaataaagaaattagaggttgtggtaggtaagtgaattgcgaatgtcatgcacctctgacctcacgtttttagttcatcacagctgcttcattgttctcattaactttgaaagtaaatattaaaattgcaactcaaaataaatctgtactgttttacatatctgaacacagtatattaatatttcatataagactttttagagtttttctagtattttggaaaaccagtgaaatagtggattggctactggttctgtgctaatagtgtttataagtggaatgggactttttttaatatgaagtcacccaaggaatttgctttttctggaggcacgttatttcatgaagtccagtgtgttatcactagactaaagtcttttctgtttgggaagtctgtcggtggggacaggggtcataataacctttgctagttgttctttgatttttggtaatggcttgatctaatcaaatatcagagattatcttagttctacctgctcagcaaaaaccaggaaaaagagttaacatatttgaggggttttttttgttttttgtttgtttgagacggcgtctcactctgtcacctaggctggagtacagtggcgcaatctcggctcactgcaacctcctcctcccaggttcaagcgattcttctgcctcagtctcccaagtagctgggactacaggaacacgccaccacacctggctaatttttttttgtatttttattagagttggggtttcaccatattggccaggctggtcttgaactcctgactcaggtgatccaccctcctcaggctcccaaagtgttgggattacaggcgtgagccaccatgcctggctatatttgaggtttaaactgaaaagtatcagacagcaaaaaggaatagtttaagttgggcttgactgttaccctaatatgcactaagtttcaaaaatacattctttaatttgcataccaccctactccagaagtaatgtagaaatagtctcaacatctggtgatagcattaaggtttatgtaagacagtctgcagcctgcctcttataaaaagaagggggtaggccaggcacggtggctcacgcctgtaatcccagcactttaggagggcaaggcaggtggatcacgagatcaggcgttcaagaccagcctgaccaacatggtgaaaccccgtctctactaaaaatacaaaaaattagctgggcatgatggtgggcgcttgtaatccccagctacttgggaggctgaggcaggagaactgctcgaacccgggaggcggaggttacagtcagccaaagatcgcgccattgcacttcagcctgggtgacagagcaagactcacacacacacacacacacacacacacacacaaaaggagtgaaaaggattgaaagcaacaaaatagtatgtagtcatcttctcaaaggaaccaaagtaatgggctgattatcttcagcttcctgaagaagctgaatgtttgtatgtaggaagtcccatgtgttatcttggcaggaagtagaaaatatgagtaatttggggacgcagaatctttcgtcacttccctccatcgcgtctcatgtccaggatcttcccaggagtcgtaggaaatgtagcatccatgcagttagtcgtttacctcctaggaaacctttgtgctcttaggagacagtggcttcccattgtggttaagtgtaaccctgtttggctgacccctggatagagcttcataccctcagcactgcatagtcacctttgacttgtggttagaaagatcagccatatagtccatcatgatgatatgttatgatggtttatacaagaaactgggactttttatctcagccaaaacgctactcttgctttaggattaggtgactttaacagggttaatagaggaatgtcttttcaactcttatttctctattatgtaaagctgtccttgaatagtcagctgttctttccagctgccacaaataatttgttctttgaaaagcttagtgacttagtggggtctttcagaataaggaatttgttatgttcaggttttggggtcttgccagtggttctgttttgcttgctttaaacagatgtaaaatgatactgagattattgctgatttattttctgttgtgctagcagcatttcagtacttttgtggtaggttgtttcttttacataaaaaataaacaagtaaaccagctgcaatctaagtaggaaacataagaatttagaatgtgtgtgatggttagattttacttctgatttcatcagaaaagttgccctctagacagttttctggcatttatagttcattgcttatatgagagaataaaatacatatagttgattaaaggaaggaagtttattacttagggaaaaggaaggtaaaaaaagaccctaagcaataaaggcaattcttttttaagcagaatactttcattttatttcatttttgtttaccagtgttgttacgaaaactgctgctggggctacttcagctgagatgatttggctcttttttgtggctttcttcttgttctgtacatcagcactgtggttattacaccagctaccaagaacatctcacatgccttttgcatataagcactcttagtccagatagggcgatgtctcaaatcccccaaagattttatttattggccaggtgccgtggctcacgcctgtgatcccagcactttggaaggctgaggcgggtggatcacctgaggttaggagtttgagaccagcctggccaacatggcgaaataccatctccactaaaaatacaaaaaattagtcaggcgtagtggcatggaccggtaatcccagctactcaggaggctgagacagcagaatcacctgaacccaggaggcagaggttgcagtgagccaagatcgtaccactgcactccagcttgggtgacagagcaagactccatctcaaaaaaaaaaaatatatatatatatatatacacacacatatatttaataatttttttttgagagacagggtctctgttaaagattttaaacaagaagtttaaagttgcagaaagaattttgtagcatgcatttctaaatttgctcatatttaactgttttttgttttattttcattttcttggttagagttgaaatgataggagaaagttgtgcatttctatccttaaaggtaattcctcaacttgtgtcctggagaagaatcaggtcatttttcccagttagattttgctgctcacatctgtaggcagaacagtcagaagtcttcagcctattcccaagtgatgatcaatgaactgaagtactggaagaccttttttgtcagagccttggctgcatatgactcagctcccaaaggtggctcgtttctgtgtaggcagtcctttgatattctgtcatttcatttcagtttggcatggccactcctcttatcattgtataaagttgattttcttaagttagcctcgctaatggtttgttttatttttcttccgaaagataaaaaacacatagtatataaccattcgccaaagatctgtggtggttggtggcatgggttaaaaaaaagatacagcaatagatagatgatagtttccagtcatgtgggtttaacttcattttctttggtttgatgcctccttgtagcaaagaaagaagttgaaggctggactgtttgttttaggtacagaggaatccgattagggatcagctctgttcccataaaccactgtgctgagacctttttgaagaattttaaaaaatgaaagcatattgcctactgctattaggaaatctatcaaataaataaataaaaggccagataattattttctgatcttcataacaacatggtatggtttgtggcagagagcttaaaaatgtattagatttgtcttcaattcttgtgttcttggtaattttctgttttcccaaacagagagtaagattttagtctcatgactttggctgatgtcagtggggctgaagtttctaaatcacccacgcacagctctaaaactgtcactgtgaattgagtccaggacaacttggaaacaagttgagtgtttttcaagtaggtacttcagcatgttaaggagatgtccatgcaaactatcactaagagaaaactcatgaccataatatagagcgtgttaaacttccagctgggttgtgggtttggggacatgtttcaattaattaaaagtgaatttatgtgaaaagttctttactagaagcacattttaaatgatttttttctgcttctatgttcatctcagacactcaaacactggcctgagagtttgaatattgctgaaacctttttacgtgatagtgccactcccttaaaaatcatcattgcttaaatctctgtagggtgttggaactggttgggaagaaaggaacagaaagaacagaacttggaaacaaattctgcccatagtgttcttggtcacttttgcagatcagaattagtagctggttctccagcaaatctgccacctcctgtgttgcccttaggtgcctaaaatattatagattttcaataaaacaaaagaaaaaaaatatacttttttaactggattataagacaataaaatcttatctttaagttatcacaagatgcgataaatggattatgcaaaaggatatggaaatgtttataagcaaatccaaggaactttgaacgacattagagtgtgatgattttttaaaaattaaaaattttttttaattttgaaaaatgttaatacaaagtattatacataggtaatttatcacatatgtgtccatgattcagaatgaacacatagtaacattctgtcagacggcttcagattgtttcactttttaagaaaccattatggttaagttcagattcccctttgtttccctgccccatgcatcttccttcctccccaaggacaaggactgtcatgaattcagtgcattcgtagtctgtgttttataatttattttcatacataaacaacatataatttgtttttgtttttaacctacataaatactaccatacagtacctctttttgtaatttgctttattctcttcagcattatatattgaggattcagcacgctgaaaaacatagatctactaatcattgactttgccttttcatagtctttttatactttttctgtagaagggaaagagaaatggacttaaagatgatgtatttgaaagactttagctgagtggggatttgtgaagagaaagggtttgagtggggtgggctttcaagtctgtgcatgggaaggatatgatggatcaactaatgggagaggaagaaaccagaaaggagcatgccagctgcaagtcctgggcatctctgtggcagaggaggggaggtgcaccatacaccctgagtaagaatagtgctcgtgaggatgggcagaaacatgttttggcttactagaaaataaataaagccgtttgcctcgaccactttgttatgcttcttgctgtgggtccagcagcctgaaactcacttacccatctgatagaatcacagcagagggaacctgggggaaaatgtgattcctcctttttaattttatagatgaggaaacggaggcctgtcaagaagggactagggtcatactagtacatacatacatgcagagccaggacctacgtcaaatttagtttgacagctgtttgtccttttgtgttactaaattgatgtttgacatactgtaatcaaggctgtgtcagcgcattcatctaattttagtttaaataggcatagtagggccgagagaggagcatttgaataggatgcatgagctaggcactatgctggagagtcttaatttgaagattcagcagtgggtgaatggtccctgccccagagaggggatagagaaaaacctaagagagtctcaatacactgtgccagtggtattaaggaggagacctgtgaaccaagtgggtgttaaaggaagtgttacaaaaggcatggaataggcctttgaggtctgggattctagcagtctcctttctggtttccttccctccccatcatcactccagtcccccacaaatccatgtgtctgggctaaaagagatgttggcccaaaagagatgttggcccttaactggtgagttgatgtagacaggacctgtgatgcttcctgaatcagtctgtgaggcattgcctagtgaatggtatctgtggttgatttcctgagtgagcccttcccatgagagtgtctcctcgagtgtccccacaggccgatctttcatttgtttctgctttacctctggcttcctggaacagttctgttatgtgactttatagcagcgctgagagctgatggtaagccttctgagacacagaggcttgggtttttacgtcagtggcccttgtaggccaagggagtgaaaagtaaaggaattgagataaaatgctgtccttgccaaattgtggtttctgctttatctttcaagaagtctccattttctcttaagtcacagttcccagaggtgcatgtgggggttccagtgacctttcatgtgtggttcctgtctcagagaatggggtgcaaaaagcccagcgtagttaagcttttcagattttatattctgtgctttattacagtcatacaaattttgtaacccctgttaggggctttattaatgtatttatttgtaatttagacttacacattgatggcagacactttcacttttagttttggtagcctctcagcttcctgtctgaaaagttccagacttactagtttttgttgattagaaatcacatctgttgcttcctaagggccaggaaactcacccttcccatcagatcacttgagtcgttgttcctctcattaagctgtaatctgtctcctggtctccaaataaagacacaaacaccgaaaaaaaaaaaatcacatctgctcgtgtttttcctcctccaaataacatcacagacctgcttcctagaagaggactgcagtgtgtaatttcagtcacattctcacatgtgagtgacttcactttgaaattcagaggccacttgtggcagcagtggaaactcagaatctgggatctgtttgctttgtccatgtgaccttgggtttgctttcttttcagattgcagtgcttttgtccacaaaggctgccgagaaagtctagcctcctgtgcaaaggtcaaaatgaaggtaagactttctggctaaaacaaggcttaaaataaaagggtttaaaccagcaaaatcctcgggagttgggagagttgaggttgtggtggattttgtttattttaatcatttggtaccaactttgagaacaaattataactaaaaaatattttttctcttaagcgatcaatcttcttcttgagtaacactggagaattagactttcagaaaagaaaacgctttcagaacttcttcacgttcaatatacatttcttcgtgattttaatatttccgtattgctcttaaagtggttttcttcttaactacgtctgcaggcctaccctgctgttcatacacctgtcttcctccttcaggactatcagggcagcaggtggaggtcaggggcattgacctgctggtgggggtggggagggtgttatggttagccccagcctgtctggtagcacttttctcctcaggtatgtaatataggtggctctgatcacatgacgtaagaatagaaagtgcctgttttatggtggtatctgccctgagcatgtatgctatgtaatcatgctttcccagtggcccttaaaaaaaagtgtgggttaagggccataccttttaggtagcctgtgaggttttcaatgttctagtcgcctgtaagtgtctcttcattccttgtcaaaggagtgctttccaacttcgtcgacacagatgattaatgagctgtgtgcttcgtcagtcaccaaacacagttatctagtgccatgacctcaacctggaatgtgcatcagaatcaactcgagggcttattgaaagacaacttactgagccccactcccagagtctcagattctgggggagagtccaggaatttgcatttctagtaagttcccagatgatgctgatagtccgaggaccttactttgagaagcactaaaactagtgtcaaaatggcaaagaataggatagccagatcttctttagcctatggacacatattttgtttggctcatgtagtatttttaaaatgtgagttagtgcagctctttcaaaatcatgttttatatcagtttggattcttaagttctcctgaaaaaactggaagatttataacccttggctccctgatatttccctgtacccagcactcccagtttttccttttttccatagtacttatcaccttcttagagtctgtatttacccatctttatttattattatatagttttttatagtctgtatcttccccccactagaatataagctccaaactcattaagcaggctgagggcaggagttggctccatcagtggcgcctgagcacctcacagggagggagggatggctggagctgagtggtgctgcctcctttagacaggatatgccagttccaggctgccactgccttcccacaccccaccccaccccagcttgcttctgtcatttgttgcctgccggcaccatagtcatttgagtttgtgatctctgataagactcaattgttgtgaatgtactagtttatacagaatgatcatgatagagacatagcatctcccatataagagaatataacctaaaagggggaattttattttattttattttattttattttattttattttattttagagacagagtctcactgtgtcacccaggctggagtgcaatggcacagtcttggctcactgcaacctccatgtcccaggttcaagcaattctcttgcctcagcctcccaagtagctgagattacaggtgcccgtcaccatgcccagctaatttttatatttttagttgagacagggtttcgccatgttggctgggctggtatcaaactcctgacctgaggtgatccacccacctcagcctcccaaagtgctgggattacaggtgtgagtcaccgcaccctgcctggaatttcattttaaataggaagtaacctatttcttctaatgatttatctcagattaatcgcttcagtgtataatctctcaaagtatttttgctacatggctacaacgaaagtattaactaaaattagtattttacccaataatttagcaccttataaatgctagttactggaaatgaaatgcaaaagtcaaaagatgctgcccttaaggcaccagcaatctactggggaagacggacagttactataaatgagaaaggtgccagtcactgccttgggtgaggagaggagagaagctatagatggctttaccaaggaggcaacccttaaatcgtcttaaaggggaagaatgccatgcttctgaaggtgagaaaagcattccaggcaggatagacagcatctacggcattggagtacgtggcaggcttagaggatggcaattgggggcgaccgtggctgggacacagggtgcttagggcagtgcaaaaagcagagtgggaaaggaagctgaactgcttgctcccttcctactcggcttctcagggcttgtcagaggtgaattgtcaatggacttactttctttctctttagcagcccaaagggagccttcaggcacatgacacatcatcactgcccacggtcattatgagaaacaagcgtaagtagctcagcccacctctcaattccctttctgactttctggttctgaatgtaaaaatgctgttgtaatattcagttattattcatagtcaagatatgaatacctattttgtggtaagtgagagaaggctgctgttttatcctgcagattcctttacccatataacattataccatcaaaccctcttggaaggtctctaaaacagtctgtgtattagcttaaaggcagcacctttgccctgtgtgtttaagcaagtgacccctgcgcatctcaacttcctctttaatagtagttgagaattaaaagacttgtttttagtgccttacaatcatacaaatcaaatgagatctggcttgttaaacttttttttttttattatttttttgagacggagtctctctctgtcgcccaggctggagtacaatagcacaatctcggctcactgcaacctccacctccctggttcaagcgattctcctgcctcagcctccccaatagctgggattacaggcacgcaccaccatgcccggcctaaacttctttctaaactgagaagttatagaaaatagttctttttttttattatttctaaggacctcaaatgttattcagaattgagtaaatcacactcttccattcacatcaaaccattttcaccagtgcatagaagactccactttggttttactgatacttttcccttttcactccccattccctgtctcattcctactttagtatatttaatgtatgtccttctaatctgccatatttttagacatatgtatactttgaaaaaaatgtattattttgtgtgaatttaaattagataatatgacttatgcttatatgttctgcttatttttttcactcaatattgttttgagatatgcatgttattgtacgctattgtttcagactatggcatggtattctttcataagcatatttcacatttaaagttcccctagagacagaatatttactttgcttccagctactaccataaataatgcaatgattaatatcttcttagctggctccatgggagcctctgtgagacttttcccaggcagtgttcttgaaaatgtagttttttagaagtaaagattcttgggccccaccctgatctgtgaatcacaaaccgtgggatgggaccagcattctgtgtttttttgtggtgtgtgggagtgtgtttaatagagacagggtcttgctttgtcacccaggctggagtgcagtggtgtgatcatagctcactgtaacctcaaactcctgggctcaagaaatcccctcacctcagattcctgagttgctggcactccaggtgtgcgccgctatgcctggctgattttttaatttttttgtagagacggggtctcactacgttgcccaggctcgtctcaaactcctggcctcaagcagtcctcatgccttggcctcccaaagtgctgagataacaggcatgagccaccgcacccagcctggtctgtgttttaatagatcctccaggtgattctgatgcccactcaagcttgaaaaccgctcctttatgcccagtttctctgagtacttccagatagctcctgaatggctatactagtctacactcccagaagagagtgattccctttagatatatttaatctggtttttatccatcttcacacgtagatgactagaagaggagcttctccaggttgatacccacttttagtctgtgatcttacccattccacatactttttatgtctagcttcctaaaatgctttttttcttgtgacattatctgttgtttcagaagtctgttttctttcttattttcatgtctttcttaaaaacaaatgcctattatgtgcaaggttcatgagtattacctttgatccccacaagtatttttttttttttccttgagacaagagtcttactctgtcacccaggctggagtgcagtggcacaatctccactcactgcaacatccgccttctgggttcaagcagttctcctgcctcagcctcccaagtagctgggattacaggtgtgagccaccacacccagctaatttttgtatttttactagagatagggtttcaccatgttggctaggctggtgtcgaatttttgacctcaaggcatctgtctgtcttggcctcccaaagtgctgggattataggcgtgaaccactgtacctggccctcccacaaatattcttattcctgttgtactccactgaggcaacatagtggtgtagagtacagattgtgaattctaattgtatggattcaagtctgacaccactgcttaagagctgtgtaactggacattaccaaacctctctgtgcctcattttcttcctctgtaaaaggggacgataatagtatcatagggtggtagtcaggtttaaatcagatcatacctataaagtacttagcagtaaacattccttaagtgttagctttcactgctatgatcatcacaaataaggaaacagcaatattgagtcacttacttgggtagaatatggattggttacaaataaggaaagctgttattttcttcccccctatgctggcttttagatacaagttattatgagctctgcctaacatcattctgcttttccagccctttcactgattccttctacctgcttcatcttctactctgtgtctcccttttacattaatactacataattacttctgccttcattccatggttcttctcatcagaattgtcctctcttttttcttctgacccatccacatccttgcaattcttcaagaactagtgttttcttcctccatcagattttatccgctcagtgacctcccttcagaaacattcaggttatgctccaggccctttaactcttaagctcattctcttttctacccacttgctctttttctcttgggtgggggtgggggtgggggcagaggggtagggccacatcccataatccttgtgtactttctgcagctagaatctggtcaggttttagaatgtcgggtttctgctattttattgtgtcatcatcttgtaaatagaatttgaattggaaattaatgattatattaatgctcattgagtcaaagacatcctgaaatactgtgaagtcataactaccaccccagtcttatttccttcacctcttgacactcctggggatggacagataatgcaacctgtgaatgggacagcaagtccattaccagggaaaaatgttcccaagtgccagcgtgaccactttagcaaattagatctccagtttcctctttagtcatgttaatgagaaatatgcactatgagaacaatttagaattgacccttgaataactcggatgataggtgtgccagccccacccccatgcagtcaaaaatccacataaaactttttgactcccccagaacttacctactaatagcctactgttgaccagaagccttaccaataacataaacagtcaattaatgcattttgtttgttatgtgtattatatactgtattcttacaataaattaagccaaaggaaaaaatgttattttaaaaatcataaggaagagaaaatatatttactgtttgttaagtggaagtagatcatcataaaggtcttcatccttgtcgttttcacattgagtagaccaagaaggaagaggaagaaaagaagggttggtcttgctgtctcaagggtggcagaggcagaagaaattccacatataaggggatctatgtagttcaaacccatgttgttcaggggtcatctgtagttacaggtgttaaacaagtgttaaattttcctcatctgtaaattaaaggaaatcatcaaaatctatgctcgctagcagggagcgcagaagaatcacttgagcctgtaagatatgtagactcttgggttccacccctagaagacaaggggggctgagattccatatctaacaggcactccagatgtcttcatggtgaacggtcctaaagaacgctgctcccagttatctctcaggttccttttacccttaaaattctttcaatcttggggccaggtgcagtggctcacgcctgtaatcccagcactttgggaggccgaggcgggcagatcatgaggtcaggagtttgagaccagtctggccaacgtagtgaaaccccgtctctattaaaaatacaaaaattagccaggcatggtggcgggtgcctgtaatcccagctactcgggaggctgcggcaggagaatggcatgaacccaggaggcggagcttgcagtgagccaagatcgcgccactgcactccagcctgggcgacagaacaagactgcatttcaaaaaaaaaagaaattctttcaatcttatttgcagcttaaatattaaaatatgtaatactcccacaggattctttatccccgttgcctgtcccaccccagaggtaaccactcttcttagttttttttgtttattttcctggagttcgcttgttaaagtaaatacaacttggattatttttctttcttttaagcatgaaagatagcctgttatatactttgttctgcactttgattttcctccccttaatagatcttggagatagatctatctgtgtcagtacttggaaagtgtccttattttttgtaagtggcattgtattctgctgtgtggtgtagtataacttattcaccagtcttcttgtgatactcatgtcattttcagtcttttgcttttaccaatggtgttgcattgaataactttggacataacatcatttcacgaatatgcaggtatatcttgtaaaataaacatagcctaaaagtgaaattgctggatcgaagaatataggcatttacaatttcaatagttatcaccaaactatcctccatggagtttttatacaaacttacagttccagggcaaatccactgtaaagcgccttacttctgcttgttatttgtcagatgggtcagtaccaggtggagctggatgggtgatgcttcagttagtgtcctctcctccatggagtttttatataaacttacagttccagggcaaatccactgtaaagcgccttacttctgcttgttatttgtcagatgggtcagtaccaggtggagctggatgggtgatgcttcagttagtgtcctccttttgcagcctcacagcccaaggagcgtcctcggtccgcagtcctcctggtggatgaaaccgctaccaccccaatatttgccaatagacgatcccagcagagtgtctcgctctccaaaagtgtctccatacagaacattactgggtaagtggagatatttaaagatagcacagttggcatctaggtgaccagagcataataatcacatcatatgacaaaaagcttttttttttttttaagaaataaatctataaggtcatgggttggtgcagacaaggacgatggggattatgtttctgatgcatgtcatgatggtcattctgtcgcaaggatctcctttaaatacccttagcaggctggttgctgtaggctttttgtatatcatcagccctacttttgaagaatctgagttctaaaaagatgattttttagatcaaaataagtaggaataggaaaaagggtgatttaattcagaattttgggttgcaaccacttacagatgtcatgcttttctgttgttcaagtaaacctggttgttttgtttcttcttacctctgttttacatctttgccttttaacacttaagtcagtttcatggaggtgagtgctgagccaattattactattaggttctcactcactcgtttgcactgagtttcttttctggtctcctggccaggccttggctgtcaagtggttagcagggggctgataatgatgttgctgactattttgggtaagatgcctgccttcccgtcgggtgaataagccatttcaaatgtaggactcagagtatctctttaacctatcttggagcaaaattcctaactaaaggatgcaaaagtctccttttgtttgtaattcctaacctctgtgctggctaatgttttctcctcctctaaaaagtttcaggtatttttgttttgttttgttttgttttgtctttgtattctcattatttccaaaagtgtacttttcaaaagttgtaacattactaaagtttgtatgcattgtaactttcaaaagttggtctttaaagtgttcttgctattgtgtctactcacacatcaattgggtgcctgctgtgctagctggtgagttgggattgagaaagtccaaagagaacatagttgattgtaagtgctagatctgtagttatctagagaacagaaaaaacagtgtattggttaggcaataagttttaaacagaaagtttcttatataatgtgtacatggtttgatggaagaaagttccccttgcttcttatcactttctttaaaaaggctcaaaaagtcctcagaatttgagtctccagtgatactaaatgctcccgactttgttaccaggccatgtgcatgttgctgtggccccgacataagcaatttgtcttcagtcactgtagtacttccagccagttgtcattctagagtcttcaggtactcatttaagaatgcaagccataggttatcagaatgtatttgacagtatgtatttttcttttgtccccagagttggcaatgatgagaacatgtcaaacacctggaaattcctgtctcattcaacagactcactaaataaaatcagcaaggtcaatgagtcaacagaatcacttactgatgagggtaagaggaagttatggcctttattttatgcctctgtagggactgtgtgtgtgtcattacctagaacataagtcttaatggagtgacagtacctgcctcttctgtatcccgtgaagattctctaaattgtcagtaaagtgtccagtgctttgtcatgactgcgtaatcagactcatccagcagctgtcaagtgaaggatgtcatttatttcgatgtgggcctactctttagtacaaatcttttccttcccttagacttttttacatgtacagttctagctcacagagcaattgtaagcctgctctcttaaatatgaaaaggtaccaggtcccttccaattcttaacttcgtgtagatagaagtcatgtcttaatcatgtttgatttatgtcatgtttattactgttaacctaagtctcgaatgtagagtctgtcactcctgaacaggatattgatttttttctggtactagaatatgatctctgtgaatatcccctgtattcatgtgtcttatgaaatcaactatcatcttgaggaaagtccaacataggcttattttacaggtcacaaacctgattctgatattgattttttgatatattgaggagtaggtacagacatgaatgaaggacaactactgggagactttgagattgagtccaaacagctggaagcagagtcttggagtcggataatagacagcaagtttctaaaacagcaaaagaaagatgtggtcaaacggcaagaagtaatatatggtgagagtcttcattttgctctgattatatttgatttccattgtccagcatttttaagcagtaatttgttggactatgaaaaatcagttttttagtatgtggcttcttgaaaagatttcctttaaaaactttaaggtacagagacgtggtcctgttggtatcctatctcctttttgccccactcttctgttttcagttctactgaacattgtacttatatgtgagtacttatttatacagcagtcctagaaagagatatctcagtttttttccttacctacactaaaaactagactaaacacaagtcatttctgagaactgggtatacagtcagttacgacaggtgctgaatccagtgaagacctctttggaagtcataatttaagactgatggaatccggggtacctattatcagaaaataggacacgtgaaaaatagaggaataagacgaaaacacttgaccaggctcagcggctcatacctgtaatcccagcactctgggaggctgaggcgggtggatcactcgagcccagagttcaagactagcctgggaacatagtgaaaccccatttctataaaaaatacaaaaatcagccaggcgtgatggcatgtacctgcagccccagctgctcgagaggctaaagcagaaagatcgcttgagcccaggaggttgaggctgcaatgagccatgacttcagcctgcacttcagcctgggtgacagagccagaacctgtcttaaaaaaaaaacaaaaaaacaaaaaaacgagaacacttttaggggaaagatagctgttgacccaattttaaggttcaaattgggctctaaactagctttgggactgcagcagatgatctttgagggcgaatgcttataaaagagtgttcctgacacttgatctttttcctccttttagagttgatgcagacagagtttcatcatgtccgcactctcaagatcatgagtggtgtgtacagccaggggatgatggcggatctgctttttgagcagcagatggtagaaaagctgttcccctgtttggatgagctgatcagtatccatagccaattcttccagaggattctggagcggaagaaggagtctctggtggataaaagtgaaaagaactttctcatcaagaggataggggatgtgcttgtaaatcaggtgagaatgggaaggatctcaggttcttacatacactgggaaaaagggaagtcatggggttccacagccatgcattcacatcttctttctaccatttattatctgtgtaagctcagggaacttatttaatttctctggagccttgatttccttttctgtaaaatgcagacagtagggtttctctcctaatgttattttggaaagttaaagggagggtatatataaagtacctaatgcatatgatagatgctcagtaaaacttagtttttcttcctcagagtctgtgccatcatcagaaacagtatagtttaagaaatcaattaatatggccaggcacagtggctcatgcctgtaatcccagcactttgggagatgaggagggcggatcacttgaggtcaggagttcaagaccagcctggccaacatgataaaaccctgtctctactaaaaatacaaaaattagccaggcgtggtggcatatgggagactgagatataagaatcgcttgaacctgggaggcagaagttgcagtgagccgagctcatgccactgcactccagcctgggagacagagtgatactctgtctcaaaaaaaaaaaaattgaaaattatttaaatatttggggctgggcacactggctcacacctgtaatcccaacagttcgggaggctgaggcggatggattgcttgaagccaggtgttcaagactagcctggcaacgtaccaagagctgtctctacaaaaaaaagtgaaaaaatgagccaggtgtggtagtgcacacttgtggtcccaaccactcaggagcccgaggtgggaggatcacttgagcctaggagttcaaagttgcagcgagccatggtgatgctcgtgccactgtactccagcctgggcgagagagtgagagaccccagctcaacatttaaaaacaaactctgtgtgtgtgtgtgtgtgtgtgtgtgtgtgttggaaatcttcaactttcccctctgcctcaaatcagaaggatctcatgtgtctaaaaaccagctgaagcacagaaagttgaataagtgactatctgtaaaatgcttaataaaatatgtattgttgatactttcatcaaggtgtggtatggttttagtcatactccaaaaaattcagctaaaattactttggtacttgtagatgtgattgtcatagacagattttaatgtttctttttaaaatattcttcttgaaaaacacattgccagtataacctttacaggcagaggggtatataacatgtacatctgactaggtatttccccaaagatgcagattccccaaagatgcaaattccccaaagattttgggcaaatatctgctgctgtgtagaagcagaggcttaattgttggaacatttgtctgagaattgtaaattttgtctttcctttgtgttcttgagcccatacccctcacttcattaatttattagcacattcactcattcatttttcaggtatttactgagcatctattaaatgccaggtagaactacaaagggggatatggcttaggcctctgcctcagggaactcctaggagtaaaagtaagcatgttatgaaataaatgcaaatgcagtgcggtaaatgaacacagatagctgcaacagatagagctcaaaattaagacctacaagtgatgacttttcctcctgaaacatccccttgggcatttccatttctctctctctgcccctcctctctggtttcatctaacttttactttctctaacttagtacttcatcaaactttgacttgtattaccatttgtacctccttgtacttgtgtacaacccctagtaagatctttggtgctagaattcacagtttaactcatagtatccgtttgctcgttctgtgtgccagtggtaggatcaacctttggggcatttgctttgtcatatgagcagataacttaccgtccctctgtctcagctcctccattggtaaatggtgaagtgaaaatctaccctgatccttctttccagttttttggtaaggatcaatttgtgttgcctctggaggtttgtagtacatggaaatcaataattagcatgtattttatgaactgcatacagaaattcattgatttagtgcaaagtgaacatacctttagaggaatcattgagattgcacacatttgggaatgatttaagggcctcatagaattattaggactgctggcctgaagtaagtagtacaaacagatacctaggtatgatggctgtttgtcatgtctgtctaacttatcaaggtcagatatttaagattgtctcatgaaaaactcctagtgaatctcattgttttattactctgtttatgacaaatagaagttagaatacattttgcattttccgtgtgcacagtacataaagtttctttaattttttgttgtttttcaaatctgtataacagctttattgagatttaatccatatgccatatagtctacccatttaaagttgaacctcttgagtaactgccagactgctttccaaagctgctgcaccatttcattcttttgggagaatttatgaggaagcgctcttgacttttacaactagactggaaacattttacaaaatggtattatgagtttggcgccccatggcataacttctgttctcttttctctgcagttttcaggtgagaatgcagaacgtttaaagaagacatatggcaagttttgtgggcaacataaccagtctgtaaactacttcaaagacctttatgccaaggataagcgttttcaagcctttgtaaaggtattgataagaaacatgaaaatccccgttattgttgagagccatgtgtccctgtcggctttcactagagcctttttcatgtgattcctcacagtctgtttactcccttgcagaagaagatgagcagttcagttgttagaaggcttggaattccagagtgcatattgcttgtaactcagcggattaccaagtacccagttttattccaaagaatattgcagtgtaccaaaggtaagtctcctttctaactcggtcttgtatggtcatggactgtttcctctgtggccagtagtactggaagccccatggaagtgctatttcatgctttagtatgtctaaaagagaccttgtgttttatcttgaattttgttgaatgaaaatttggactgttatgttaccagacttaggatagatgatagcaagaaggaaagggaacacattgattccatccagagttcaatgacctgaacagtattctgttatcactaggctgggagataatttccactagttattcccagaagtgctagaattgctgctgtttttcacttaatcagtaattactggtttctctctcttggctaattctgttcctaggtagttattttaaagattacaaggcagtacattaaaaattaagtaaaacaaataaaaaaaaaaaaacttggttgctcttcctgctattactgtccctcctagaagtctttagttccttttatttcagagcacaacatatgattgcatattatttatatcattgaaaacttctgactttttttagaatcaaacttatgacagcaagaaggataggcacatgatctctgacgtgttggcttccctctgatagcatagtcacaaagggaaaagatgatatggagtgagaagtcaggattcccttgcttctgcccttgtccaaaaagagccataaaaaacagaattattctttccttccaagacaatgaagtggagcaggaagatctagcacagtccttgagcctggtgaaggatgtgattggagctgtagacagcaaagtggcaagttatgaaaagaaagtgcgtctcaatgagatttatacaaagacagatagcaagtcaatcatgaggatgaagagtggtcagatgtttgccaaggaagatttgaaacggaagaagcttgtacgtgatgggagtgtgtttctgaagaatgcagcaggaaggttgaaaggtaaggcttggctcttttgtcttaagtatgtgcccaggtaaaacaggcaaaaatccaagtgcttttgttggaaattcactaccagatttttttcccagagagcccatctctaaacactacccaggagcaacaagcatttagttcttcgtaatcttatatcaaaaatggtttgtgatggcctgcaaaatcatacaaaatagaggaagaagacaaagaaatgatgcagtcagggaaaatggaaaataaggttttaaaaaaacaaagcaaagcgtaagattggtgcacatatgcaagctgtcaaggaaggtgtattcccctataagagatggacagccaggttggaattgggatctgtggcaaaactcacaaggagggagacacagtcagcgagtttcacagaatctgtgagttcaaaacacatcacttgttcacaagagatgttagaggagtttgcagctccagacacctaatagaaagttaagtttaacccacatcaattagatttttttattgttataatttatgatattcgtatatctttaaagcaaaataaatcataaaggatgcccattttccatttggttttaatttttacatttctaatagtcagccgtatcaagttaaagaagctatgaggcttgttttttaatttatgtgtacatttgattttttttgtttgttttcatcaaacctatactccatgggcctatatgttacaccaatagccttgaattatacccaccccgtcgccctggcctcagtgagctgaggacattgaagcagggtaggccagtactgtcagcctcactggcatagaaagaaggtggaggaaatgggtgctgctttcatttctgaggtataagtgatgatgtagataactgctataggaaatgcccacgcatagaacaaatggtaaagaagttccaggcagtcagctggtttcaacaatgaataaagcaggacaccctgcttagaagttgaaatcaaaatgaagagccttggaaagagatacctgctctacagtgtggtgagtgctggaatggaggagaaagcaagaggaatagcaatagagtcaagtcttgaaggatgacggcacataaggagaaagtgttccccacactaaggaagagaaagtggaagcacagagttgaaagggtgtggcacatccagggaagagtggacacccgggactctcacgtgagagagcagagtgaatgacaggggagtgacgggaaaccagcccaaagaaacgggaggggccaggttgtaatgaggtgcattctccagactgaggagttaacagttgatactattgatgagggaagggggcaaagaatgggttcaaaaacgagaacggcaagcaggagagggatacatgaggtggtttttcagtatgacaactaggggcagtttagagtgcagctggagtgaagagagactggtgacagataagagactgtgcagtgctttggggaagagctcatctgggcctgcattgtagcagaaggcataaaaaagaagggcagaaaagattcagagaaagaaatctcctttcccaccaccagctggctgtgtatttcatggttctgtgataaacttaaactaaggctccttccctccagtcttaatattccatgatgttctgagagccctagctctctttgagacttttacgctgtctggcagttcagaaatacctgccccttcttgtaaaggcctgaatttcctagagctgctgttgcctggatccagcgctttattctttcctttacatagcaatttatttattcccaaaataaaaactagtagattccagctgttgcaataaagttgtggtcaagccagcggcagaacgataggttttctggcctagaatgcctcctgtagagataggagttggtgtttagtcattttcacccccaagtgaattcatgccaagaacagccagtactatgttgggtactctttgaaaggggtgggattgtttttctctgatccactgacactgatcatataaacttcaagattcaatgaagttaaaatgtgtgtctctgcttttttggggggagggggagggtgcaggcacctgaattatttaaaagtaaactttaaaaaaaaaactttttcataactgatggcagtacacagaaaattgcagtagtttagcctaaaaaaattagacctccctaggaatcagatgtccttgcttctgttttcttcatagctttgcagtgaattccacagaaaggggatttcagttgcggcagaggtagaagaaaaggtggggcatggactgcataaatcagttccatcctttcccagggaattgtggacttcactttccacagtgaagatgttacataggggccaacctgctagctcgagatagactcaactccagagacatcaaaccatcctcaggagactagtggaaaatgttactacctactcctagaggattagtcagagctagagtttaagctgactattgcatatggagctgaggaaagagccctatattcacatgtacctgtaagactggaaggcgcctgcctgtgtggccactctttgttcttttgagggcatggaagacgtcttttcattagacttagatatttctatacttcatctttgggcagcattcctgtctcctgccccacacctttcccattactgtaattagaagtcgaaaaatattgcaatctgagtattttttggagtatcctgctatgtgttgctgtttaacatctgtacaagtccagcttttcagctttattcttaaaagtattttattcttaaaatcttgtcttatgggatatatctttctaggactgagtacttaaacttttccaaaacaaggctttggtgataaatcccattttaaaatgctgctaaaaatctggtgaccagatctgaatcctggagaactgtaaaactgttgctttggaggagtgtgatctcagatcatagtttgcccgtataggggtgtatgtgttgctgaaacacccttcaataaaaaaccttctgactgtgggtaactattaagtagtcatcgttttatcttcccttctcccatttccattttccagaggttcaagcagttcttctcactgacattttagttttccttcaagaaaaagaccagaagtacatctttgcatcattggtaagctgaattgttatttttgtaatagtattataagcagctagtttagttatggaatgtaagcactatgttattgctctcccccgccctcttaaaattaaatggctcaggacaaattcctctgagtaatttcccacatgccctcagaattttctggcatcccctcttcccaaaaaattattattctgtttcatcacagtcttcttttagtgtcttggacatctgactatttgatctatgaagaaacctggtcactggagcatttctcacatttgagcccataaatggtgctcatgtataatattgctgactggattctttggggaacctggaaagattcatcgtgtggaaaacatgactggaacctttagagccataaattactatttcccttttgaaatctttttttgttaaaatctgaatgaaataaggagatacttctctttatcctaaagtagcccttgtttttcaaactatgtgcttttttaacagcatctggtcttaccttagattgaagctgtccttcagagttagaatattgtatatgtatcttttatttgccctcttccctttttccaggaccagaagtcaacagtgatctctttaaagaagctgattgtgagagaagtggcacatgaggagaaaggtttattcctgatcagcatggggatgacagatccagagatggtagaagtccatgccagctccaaagaggaacgaaacagctggattcagatcattcaggacacaatcaacaccctgtaagttaaccaccaggccccacccttcccagccctcctgatgtctctgtgtgatttcataacaggctggactgtgaccagagtaattgacatcttaggaattttttgttctgtcttgtttgggttgtattaggaacagagatgaagatgaaggaattcctagtgagaatgaggaagaaaagaaaatgttggacaccagagcccgagaattaaaaggtgaggcattgcgagtggtctgagccccttgtctggaatgtctgcagttgcagaagactgctggtggattttagaggtacgggtttgccctcagttctaaagctgccccagcaggcacttgaaagcagcaaaatgaatagctgttaacaaaagagaaaccaaggccaggctgacatgggtcctcgtaaagaatggctgcaaggatgtttccagtactggatcaagagaatattgattctcttgactcaggatccgtgttctcaaacctcatgacattctctgtactttgtcacaggcgaatttgccaaaatttgtagtcacatctaagattaaaacaaggagagaaaggaatttggggaaaagaattctccagttaatctgatttaatcctcccccagtccctagcgttatcacttatccgcatgtttacaaatgagttgtgaggtgaagttttgggagcagggtatgtatcaatctatgtttgacccttatttattgagtgctgactgttttgtgtagtcttgtcagtatccctgcaacacaggcattctaatccccattgtgccgatgagacagtcgaggcccacagaggacaagctacccagggttaacgtgtgtagttagtgggtaagccagaattctattccctgtcttagcaaagcctggtactcacgtatgtagttagtggctaagccagaattctattccctgtcttagcaaagcctgttgctcttttctctttgccagtggcttatcgaatgtttcaaagtaaagactatgctttggatagaaataaggcttagagttaaataaatgtaagcacctaaggagtttggttaggccttaaagccatacagatgatagcattctgtctcactgagggggaaattaaaaatatggacagctttagaccagagccagagttatagcaaatttattggcccatgattaggatgacaaggataaaaatcttccttctttaaattttgtcaagtacctggctaggcatactgctaggtacaacagatgcaaagattccttaaaaagagcccttgcccttgagaagctcacaccctagcaggggagacatacatcaatgatgggccacacagtgatttattagaccacaggcacaattagcatgtgtgggatctgctcatcctgcctctagtaagtctcacagagaagctggtgcatgagctacatctgaaaaaaattatctcagcacacaagagtggttatgtgcaaaggtgaaaaaggacttgacatgtctgccaaggaatgacaggttcggtgtgtctggagggtcagggctaagggatgggatcttaagctggaaatgcaccaggtattaaaaggcaacaagggactcatgtaattaaaaaaaaaaatttttttttttaacatgttgaagatagttaggagagttgcttgagggaatgggaagccactggaagtacaaagaccatttggaagactgttaggataggttaagtgagaatgagctggagaaggaagagatgtaagaaataaggtcattaaaatctgatcagttggccaggctcggtggctcatgcctgtaatcccagcactttgggaggccacggcgggcggatcacaaggtcaggagttcgagaccagcctgaccaacatggtgaaaccccatctctactaaaaatacaaaaattagctgggcgtggtggcacgtgcctgtaatcccagctacttaggaggctgaggcaggagaatcgcttgaacccgggaggcagagggaggtagaggtttcagtgagccgaggtagcaccactgcacttcacttcagcctgggtggctgaacaagactctgtctcaaaaaaaaagagtctggtcggttggtggtaggacagagtaaggagacagagtctctcacaggtttccaaatcaggtgacctggaagatgaagagttgttgactgagaaagagattccacactaaagggaggaggtagtgggctggagaaaagattggtttctcacgtgctgagaacaaggcatctcagtagaggtggccacgtgggcgccatggtctgctgctaagaaaggggagggtttttgatggtttaatgaattatcagcatatagaaggtcattgaagccatggggatgaatgagatcctcaagaggaaagtgggtaaggtaaagaagacagctcaggccaggtgcggtggctcacacctgtaatcccagcactttgggaggccaaggcgggcagatcacccaaggtctggagttcgagaccagcctggccaacatggtgaaacaccatctctactaaaaatacaaaattagccaggcgtggtggcacatgcctgtaatcccagctccttaggaggctgaggcaggagaatcgcttaatcacttgaacccaggaggtggaggttacggtgagccaagagtgcaccattgcactccagtctgggcaataggagcgaaactttccgtctcaaaaaacaaaaacaaaaacaaaaaaaaaagaagacagctcaggatggagctgagacaggagcccagataagagattccattgcagatggcagatctgtaaagtgtcctgagaaagaatggtaggaagagaactggtgtcctaaaagctaaagaaggaaacatgttttaaaggaagaagtaatcatcaatgctggaaaaaacaacctaaaagacctcattggattcagtcatgaagttgagctgggaaagcagttgcagagtggacagaagctagagagtagtgggctgagaagtaaacaggggacacgggagtggaagcaaagtgcagacttgttatgtcacaatttccatggtttgccagaaagatccagaatggttttccagatagaaatcacagaacagaaacaatattgctgtcttgatgaaaaagaaaaggcagtgtgggtggggagggtgtcctgtcttgtcactttccataaattaccacaaggtggtgctcgtgtcttagtcattctcgtaattactaaacaccaatcaaatcacagatcattttctccttcctgcagaacaacttcaccagaaggaccaaaaaatcctactcttgttggaagagaaggagatgattttccgggacatggctgagtgcagcacccctctcccagaggattgctccccaacacatagccctagagttctcttccgctccaacacagaagaggctctcaaaggaggacctttaatgaaaagtgcaataaatgagggtaattaacattcagcattgccccctcttcatctactcccagagtggtttacacactaatattacctgccagtttttacttttttactttaaagcacaaatgcagaaaattacccaaaacaaatatttcactatagtaaattatcaggtgaatatccttttaaccactactcacatcaagaacttaaaggggccctgaagccccttcctccacatgctctgtccccatcacacctccctccctccaaaaggagcagttattctgactgttttttaattagtcacttatgcttttttttttttttttttttttttggcaggatcttgctgctctgtttcccaggctggagtgcagtggtgcaacctcggctcactgcaacctccccctcctgggttcaagtgattctcttgtctcagccacccaagtagcttgggactacagatgtgcaccaccacacccagctaatttttgtatttttcacagatacagggtttcaccatgttggccaagctggtctcaaactcctgacctcaagttatccacccaccttggcctctcaaagggctgatattataggcgtgagccactgcacccggccattaatcacttacttatatatctttatggcttaagtgcctactcctagacattatagtttaatttgcttatgttttttgatatgcatcttaaaattcttaatttacagttccccccaccatctttttttttccatataatttatctttgaacaatctgagctttttgacttagagagtttcccacagtttggattttattcatacagtcctgttgtctgtttccttcagatttgcagctggattcagaggcgtaattaattactcagacttgatctctttggtaaattgtgcccttatagtgttgtgttctttcattgaggaggcataaatatctagttgtctctttttttgtgacatataagaaaagataaaaggataaattcttgattatttttcccctccatttatttaccagtttttaagaccatgaacatcttctgaaagtgacccatagtttttattatggactcatgaattgaaacatgtttgatggggccaggcacggtggctcatttctataatcccagcattttgggaggccgaggcaagtggatcacctgagggtcaggagttcaagaccagcgtggcccacatggtgcaaccctatccctactaaaaatacaaaaattagccaggtgtggtgacatgcggctgtagtcccagctcctcaggaggctgaggcaggagaatcgcttgaacccaggaagcagaggttgtagtgagctgagatcgtatcactgccctccagattgggcaacagagcgagactatctcaaaaaaaaaaaaaaaaaacgtttgatggatttcaagtcattgcaattcctaaccttattaaaagctcagaatgttccttttgtgaacacctctttctttggcttctagtcctgtggacgtgaccatagtagtcttttagagctactggtatagtaagttgttccaggctcatcttaattgttttctgccccagtcctggtatcagccatttctccaagagttctggattctttaagtgggaaattatattttcagaccacagtctgggtactgggagtggtcattgctgctaggttgattgttactaggttgggccttttcagtggacagagcttggggaaaaacatatatataacattatatatatattatataacataatataacattatatgttttacatcatatataatttaaatacctattgaacataaaatgtgtatatgaaaatttatatttacactttcgaattcacattgatattcttaaactgtggactacagtgtttgtttttttaactaaacctatttagtattacatctctatttcctttctttcacattgcaaatccttgttcttaaggatacatcatagaattcgaatattatatatttactttctggctttatccaacctattactcataactgttagtaatactaatagtattactaattactattgctaatactgttagtaatactaatagtattactattactattaactaatactaatttactaattactattgctaatactgttagtaatactaatagtattactaacactattttgataataatatattctaatagtaatgctgctaccactacatatgacttttacttgctgtccgcattctcccgtttttgaaaaaatagttgtgctgtgtctacgctgtcagtttataactgttacatgccatatgctctccttgtaagccttgaccatagtctttgttctgtaagtgaacatacttcatgcttaccagaagttcttaggtcagtcaccctctagtcatgtggatatgtgaagctgattctctagcatgtgcctcaggaaaggttcatgagagtaatagtccatgagctctttcatgctggtaataatttatgccctttatacttgaaagcctattttgctgaatataaaattattggcttgttcatattttcttccccaaggtattaattactctcaagtatgttgttttatttttttttctggcataaagtattgccatcagagactgataataatttgattttccccatgtaagtaacatgctctttgcctagatgcccaaaggatttttttctaagtacaagtagttttacaagaatattccttggtatttgttaccctaggttgatgctgtcaggttcacagtgttctgttttcatatgtggtttcaaatttttcagatttcaggaagttatttttgaattataatttgtactattttccctgttccctttgctttggtcttcttcaaggtctccatttatccttatgttggaccttctttgtctatcttcagtgttggtcactttcttttaatacttttgatctcttcatctttttaatgtttaaatggtcttcctttcaccttcttttttattaagccattttctgctgggttaatttgctcttatattctagtttagttttgatttctataatgattgtttttcttttgtttgtagctttgctatttcatttctgtgttttctaattctgacctaagttagttctttcatgtcttttgtcattttcttttctttcttttctttttttttttttttttttttgagacagagttttgctcctgttgcccaggctgcagtgcaatggtgcgatcttggctcagcctcagcctcctgagtagctgggtttatgggcatgcaccaccatgcccggctaattttttgtatttttagtaaagacggggtttctccatattggtcttgaactcctgacctcaggtgatctgcccgcctcggcctcccgaagtgctgggattacaggcatgagccactgcacccagctgtcttttgtcattttcttaatgtgttttggtcacctattttatggacatgtctttccgatgtgcttttattatctgtagagaagttagaccctgtgttctccccaccatcactccctgttcttaactttatatgggatttgacttcaatattttctattgctcatttttatgtgaaattagtgtcttaagtttacaggttcagatagcttttctcacaccataggactcgtctatcatttttgtgtagtttttcttttttaatatggcttgtcttatcagatttcctgctattggttccctcccttattccacctggcccttctttttctttatctttttatttttctcctgtttaacttttattccattttctccactttcttctttctgtgagccataccctagaaaagaaccctagtgggccagagttgagatgcaaattcttagactactctagccccttgaactcactccatattggcaaagccagaaatcctgactgttttacttgctgttctcaaatcaatccatcttactttccagggaatatcttctgtctgctttggatatgattccagaagccatgtcacttctagtaaattactctgccttccctgtacactttcaaatttcctaggcctcttgcatataaagtggaaggtctcatctctaaatttctagtagaatccaactaaaacacataccctgagctgagacccttctctgagcaaaggaactcacccagtcactctttggaactttcaagtcgtgctctttgtacgtatcatatatactatgaacttgttttcccctcattgaaagataagatgtcagctttgcatgtttcctttattccagtggagatccttcagggtttggtgagtggaaatctgggaggcacacttgggccgactgtcagcagccccattgagcaagatgtggtcggtcccgtttccctgccccggagagcagagacctttggaggatttgacagccatcagatgaatgcttcaaaaggtaaatgatgtgaagtcatgagcttttataggcaatccttgactatctcacacaactcaaaatgacttgtactttagtagctacatcaccgctcccaatcagcaaatttcttagtgagatttcaagacactcaagagcttgtcagtcagactcatattcattttgagtaacaaaaaagattttcctaagatctcagctaaaagagtaataatacatgttcctgcttccatttcttctgcatccgtaaaattattaataatcacttagctgccaccaagcagctccccctttttgggggcatcagtaggtttcagacatactacatccccaagatgcctatatgatattctttccttggctaatctgtttcacaactttaaaaaaaaaaacaaccctattttttgtttaggaggcgagaaggaagagggagatgatggccaagatcttaggagaacggaatcagatagtggcctaaaaaaggtatttctctttaaaatacaccatgaacctccttggcactttcctctgaattcataacctttgaaattatttcactttgatgttgttttcgatgcctgaattgctgcttttaataaaattattttcagggaaaatcacatttttaaaacaaatagtacagttaagagctccacattattggctgtttggcctcactggcttagggcagtgtgtttacattcataactctaccatggtcctggcaggaccagtttcattaggtttgtttcaggtgctccaaaccgacctgacctccttacaaggtatcagtgataaatagttcaacctcttaaaccttcactaccttagtgagaggctgtggtagaaaatggaaagctacagcctaacacagaaacacactgaatgtcatttttgcatcaagatcttcatttttttatatgtatgttttttgttttatagggtggaaatgctaacctggtatttatgcttaaaagaaacagtgaggtaaggacattatgaactatttaagaaaatatgtgtttgttgtcattgtcaagttaggaatattgttttttccttttttttttttctttttgctgttacaaagaggctaactgctggctatcatctgtatgtgtaaacaatacagttgtcagtttccttggcctttcccctgtctttggtcctaggggcaccatcttggaattttgccagttagagaattgcctgctaagatggcctttgattcgtttctttgattctctgtccttaaggaagcctcttgctgtttttttgtttgtttgtttgtttgtttgtttgtttgagatggggtctcactctatcgcccagctcgctgcaacctctacctcccaggctcaggcaatcctccagagtagctgggactacaggcatgcctgccaccatgcccggctaacttttgtattttttgtagagacagggctttgccatgttgtccaggctggtcataaactcctggacacaggcagtccacctgccttagcctcccaaggtgctgggatgacagacataagccatcttatccagcgcttcttgcttttaatgagctttctctaaatagggcctgtgaaatccctgtggtggtttcctttggtctaagcacactgagtagaattcatagcagccttttctctatcacaagcctgatactaagagccacaggtctggaacatgggcatttaacttgtgggtaatttgacacagtaatttcttatccttcaagtactcaagttatatcatcatcttttttttttttttttttttttctggggatggatcttgctctgttgtccaggctggagtacggtggtgcgatctcagctcactgcaacctccatctcctggattcaagcgattcccctgcctcagcctcccgagtagctggaattataggcatacgccactacacctgactaattttttgtatttttagtagagacgagttttcatcatgttgtccgggctgatcttgaactcctgacctcaggcaatctgcccacctgggcctccaaaagtgctgggattacaggcatgagccaccgcgcccagccatatcttcttctttgagtattgctttagacttaatatgtgtttcatctgtgaagcagtcatggtgtccttctggaaggatgcccatcccccatcccacccccaggactccttgttgtgacataatcttcagattactgccatctctaaaattaattctgagtatctgactttgtaagcagaatagaagccgatacatgataattgctttttagagtatagttctcaaggatgttgactgtgtttcttctttttcttgtccttgcttttaacgttaagttaaaagtctccaaggaactttatttttgaaattttaaggggaatctttcctttttccccctaaaatacagaaggatattgttttatatttgttgccacaaaagtctaaatacagtggagtcctgaaggaatccttcagtgtgcttatctttaaatgacaaacctgagcttatggaagctacttgctctctggatctgctgcttgaaattagctcacagcagcttccacgtcccaggttcaagcaattctcctgcctcggcctccagagtagctgggactacaggcccgcactaccatacctggctaatttttttgtattttagtagagatggggtttcaccatgttgcccaggctggtctcgaactcctgacctcaggtgatctgcctacctcagcctcccaaagtgctggggttacaggcgtgagtcactgctcctggccttgatttttctttatggcgacttttccctctatatttagttacaagaatcagggtaagaaatagtacaagacctgtttgtttttcagacattccagtatggattagacactataaatgcttagctagagtcggcaggttcttctgttacttctgtttattaagaataaaataagaggggccgggctcggtggctcacgcctgtaatcccaacactttgggaggccgaggtgggtggatcacttgaggtcaggagttcaagaccagcctggctaacatggtgaaaccctgtctctactaaaaatattagccaggcatggtggtggacgcctgtaatcccagctactcaggaggctgaggcaggagaattgcttgaacccaggaggtggaggttgcagtgggccaagatcgcaccactgcactccagcctggacaagagtgaaactccgtatccatctcaaaaaaaaaagaataaggggtaaaaaattttctcagaagagctaagcctggtaattaagatttttgtgttttgtttttaaatgtattataaaaggaatacatgttcatggtagataagtaacataagttacttgataataaacataatcccaccactgaaaaatagctaccgttaaatgtttggtgttttcccagcactttgggaggccgaggcgggtggatcatgaggtcaggagatcgagaccatcctggctaacaaggtgaaaccccgtctctactaaaaatacaaaaaattagccgggcgcggtggcgggcgcctgtagtcccagctactcgggaggctgaggcaggagaatggcgtgaacccgggaggcggagcttgcagtgagccgagattgcgccactgcagtccgcagtccggcctgggcgacagagcgagactccgtctcaaaaaaaaaaaaaaaaaaaaaaaagtttggtgtttatatttccagccttctacataacatatccgagttgtatatgtgtgaatagtacaaaaatagttttacataattcatagcaatacttcgtagagcttcatatcttgctttttttcctcttaatatgcattaaaaacatttccccaaggcatgtttttacaaagcatgctgttgcacagcttcatcttattgtgtaccataatttacttagtctttgtgatagttaaccgtttttctacgttttgcttttaaagcagtgagccaagaaaatctttgtacatacattgttttttcacagctctctgattatttcccgagtatgccaaaatgcttttgaaaggaggttttgcagtgcttggtactacccattagacatacaaatgctcattttcatcttttaccaacattgagtattatcattcttattaagtttttgttcgtttgataagtttgggtcatttattttattttgcatttatttgatttcaaataaggttgagtaatttttaatatgttatgctattggccatttatatttctaatgtaaattgctggtttgtgttcctggcctatttttctactagggtattttttttgtcataatgttctatgagagccttttttaaatgaaagatttttccatttgaatttctattagttctttgccttttaattttaattttacatttttacatagaaatttttgaaaaaaatcttctggtttcttccattacttctgtgtttgcaaagccttccctgtttcaagattagaaaacagttctagttccttccagctctttttttttctttttgaaataggatctcgctgtcttgccctggctggacataaatatggtttattttttgcctttaacattttcagatatttgaacctttttttgtgtgtgagctaagatctcaactcaatttttttcagaaatttagccaattttctcagaacaattaattgaatattctttccattaatttgaaatgctatttacatgctaaattgttatgagaagtttctggaatttctgttctgttgcgttgatatgtatgctgtttttattctagtcattttaagtaatggaagctttctattacattttaacttgtgctgatgttcctcctatacataggtcactgtggtcttcgtttgtttttcttggctgctggtgctcacttagtttctttggtgctttcaatttgaaaatatttcataaagatataagcatttagttgtatcttaaaggagccatcttatcaggtaaacattagtgtgatggattctgagattcataaagccctgaaacgaatgtttccattttgttcctttggcagcaggttgtccagagcgttgttcatctctacgagctcctcagcgctctgcaggtgcgtgccttcatcttccatccctgcgtttatttgtctagagaacagcagcttggggctgttgttgacttggatctttgaggtttgcaggatgtttaatggataaatggggccctcagtctagggaagactggctctcgtggtgagaaagttacagaatgcatcgaccttccaggactagaattagtgaagagctggtgtgccgtaggcatggcttgataaccatgctacaaatcacatagcatgctaacatgcatctgggagattacttcactttagaaagccttaagtatgattataagtttctatattccgtatctctgtggtatttgaatagagtggccttcctaatacagcttctgtttcggacttcccaggaacatcctcaaattctgctcacttcctttcttgaagatctaacctgtctcgttcctactttctcccacttccaacacacacacacacaacccacccacccacacagacacacacacacacaaccacccccccccccaccccaggtaataccactgactgcaaacagcatgcaaccagattgacaaaaacccgtgagttcctgcacctttgaggttcttgtatgataaacagctgcaattatcctggagcatttttatgagacgggcttgaaaaatgaggggagagttctagtccgtcatagtgcctggtgccccctgctgtggggtcgggagggatccagaagctcgctgtcgtcctggccagagttgcagggctcccctctgtgtgcctcccagggtgtggtgctgcagcaggacagctacattgaggaccagaaactggtgctgagcgagagggcgctcactcgcagcttgtcccgcccgagctccctcattgagcaggagaagcagcgcagcctggagaagcagcgccaggacctggccaacctgcagaagcagcaggcccagtacctcgaggagaagcgcaggcgcgagcgtgagtgggaagctcgtgagagggagctgcgggagcgggaggccctcctggcccagcgcgaggaggaggtgcagcaggggcagcaggacctggaaaaggagcgggaggagctccagcagaagaagggcacataccagtatgacctggagcgactgcgtgctgcccagaaacagcttgagagggaacaggagcagctgcgccgggaggcagagcggctcagccagcggcagacagaacgggacctgtgtcaggtaatgggactccctgccgagagcaacctaatgatgatattaattaagaccccctgtgtattaagcaaggtaagaaagtgagcagaaatatagagcctgtttttggccagatgctcatgcctgtgatcccagcactttaggaggctgaggtgagagggtagcttgaccagcctgggcaacagagggagactctgtctctcctaaaaaaaaaaaaaaaaaaacaaacaaacaaacaaaaaaaaaaaacagtttttaagaatctttgtagctggacacaatggctcacacctataaatcccagcaccttgggaggccgaggcaggtggatctcttgaggccaggagtttgagaccagcctggtcaacatggcgaaacggcgtctctactaaaaatacagaaattagctgggtgtggtggcaggcgcctataatcccagctgcttgggagtctgaggcatgagaatcgcttgaaccggggaggtggggattgcagcgagccgagatctcgccactgcactccagcctgagcaactccgtctcaaaaaaacacacacagaaaaacaaaaagaatctttgttttaccccgaaagagaggcagaggcagaaagtcttcttctgctttttgcatctctaagaggctgaaaaagagaatggaagtgctggggcattttggccagggcagtaatggatatttggagttggcacttccctcagctagaggagtctcagtgtgtctgagaaaatggcagtcagccatccaggattttaggagcaacgccactgctctgtgccacatcagaaatcaggcatggccccaacctgaaggaacttgtagcttaatggggaagcacaccaagaataaaagagcctccagaacatgtggtgcctgtggtcctgagacagcaggaaatggctctcaggccagagttgctggaagaacccatgtggcaggatcggtgggaggcagttacagagggaaacgcccatcccagcaactaggggaggccgccactcctctcgtggatggatgatattcttgcttggggatgttgagacagctgcactctgcatagttcctgatttgcctctctactgctgatgaaaaacctctctttctctatagctgctgcttatattggaaggcttttggttattcagcacactcactcctgagcttatttcagtgatattccttggttatttcgaaacatggatgcttgtggcagatggagagcctgggtgtacacagatctgcctgtgttttgaaatgcataccatgttgccgtttgtttgattgattgatcttggaccacgaaagaaaattatactgacagcttccagggtagggggcagttgtagctttctgcagatgttgccaaatatattgggggtggggagcagcaaatgccatgtgttgctttttatgacataaggagggattccacccccatcccaataaaatcggtgctttgacaaaggagggttcccaggcagctaagagaacccagagtagatgatcctctttatctctggtttaacctgtgactaggattcttggtgtaagctcggcttttccacttatcctctaaccggaacaggcttctataatctctttgccttaaaataattatctgcatccctgtgtagagcaatcttaagcagctctccttgtttcttcagggaatgggaattcttttctaagtcgccccatcaaaggtactattggttttttacaacgccggcgtttgtgtatgtagtaaaagtattaacagcattaaaggcgatatttttaacatgtttatagatactacttgggggagggcagctaatgaaaccttcaagctctatgcagtccacagacgtgagctctgtagagttcgcagaggtgggtaagtacccagccagcacacccagttgaattcagccaggatttattgagttggcatcacggacgctgacagcctccaagtgaaaacccttctcttgaatatgtacaggtttcccatccacataccaagctgatgaggatcccatcgttcttccccagtcctgaggagcccccctcgccatctgcaccttccatagccaaatcagggtcattggactcagaactttcagtgtccccaaaaaggaacagcatctctcggacacacaaagataaggggccttttcacatactgagttcaaccagccagacaaacaaaggaccagaagggcagagccaggcccctgcgtccacctctgcctctacccgcctgtttgggttaacaaagccaaaggaaaagaaggagaaaaaaaagaagaacaaaaccagccgctctcagcccggtggtgagtcacgcacacctgctctccctgtggccatagtgtctgtgcattctgagagagggtagattttagtggcatggggcggggttgaaaaggggacagttcagatgctcaaaagccaaactgccatccttttcaccagctccgcttgctaagagcactcatgcagcgaacattaagaacccactctgtgtggcacgtgtgcagaagcagagagcatgggtttcattttcaaggcattatccgatcgaggaactggagctcacccctcaatgaagtaattcaagtcctccttgcctttctgggcctagagtagtcattggtaacagctagcatttggtgatttaaccctcaaatgactgtatgaagttggcactgctaaccccaagagaagtgaggaaactgaggctcacagaggctaactaatgtgccagcggccacagagcctgcggctgaattccactaaatgcctccctgttcatgtaccactttttcccctgaatccttctctttaggattgatctctcctttctgtgtgggaggttaaagaaaaagtacattttcctggcctcttcataaattctagtgattatttaaaagttaaagggagcattaggcagtgaaggatatcacttaagaaccttattaaccaaatttgttcagaaaccccggtgcgcagaagagttaattgcccataagccccagtcgcctgtttgcattacagaagactttgggatggggaggaagttcaatgaaaggagcagtttttctgaatttttttcattcttggttttcacatttccagatggtcccgcgtcagaagtatcagcagagggtgaagagatcttctgctgaccctcttcctctctgctgaggcagctgcctcctgatcctggccagcccacctctcctgctgtccccgcgtgcacaagtctcttacactggacgcccactgctcctcagcgtccagtcctcctgggcggccccaggtcctggacaataagcaacagatgatattgagtgtcgggtggggaaggaggcccagactctgcttcggccatgatttgtgactgcccaggactctcaggttgggctggccctactcaggattacactgaaagtaatggcctcgtaagtacaggtgatggttttggacacgtcaggaattcctaaaggctgaaagagtgtatccaagtaaggtctgaacctccgaatgccttttatttgggggaacacaaaaccaaacagcagatgttttggacttgatctgtgtacgtacatggggacctgtctgcatatacacacggggaatgccagaagaaggcccagtctgcaccaggcgtctggtcaacttagcacaagggcagtgcctggacggacccggagcccccgcatatcagcagttcacccagtactcctcagagactggtttccctctaaacccatcccgggcacataccacccgtgttttgcatgtatttctcatttcattttagggatgacaaacatttgtgaaaccagtgagagaaggcttgatgtgtataaaagacgtgatgtgcaccacctcgatctcggtgtttcaggcactaaagcaacaaaacaacccatagtatctcattctgtcatcagatccagaagaaatatcctggttttccagcatgtttacccacatgttttggccatggataaagtgaagaggcctactcaccattatccctgcagcgtgacaccttttgattgtcactgaccactcagaaggggccacggcctcctggctgtgttcctgagcccccgtcgtgcctctcccagacagcagctgtctggcccttgctgggtgagggcacaccactgccaggggtcagcctcgcacccaggccaggcagaagctgtgctctgaagctaggacagctggctgagaagtgggttcaggcgaagggtgaagccatgtgtagcagttcctgccagtgcagatctggagaggagctggcccggaaggcgtggttgtgaaagcgcccttcttatgttaggaggccttggcaaaattggatttcttcaaaaatacatgtaaaggtctgttgttgaattgtactctgcccctggaagcagatacagatggctgcctgctgctcggctttgcttttgcttttcccaccgtgttttcatctttgttcacttgaggctttccccagctggtgtgtgcaggacagttcatggtaatgttgccctctgaggccccgtacaccagaagggaggccctggaaaattttgtgcttccaacgtggccttcaattcttgcttttttgcccctcggaagcatggggcttttgagcacacttaaaaaaagaaaaatctgtaacttggtgcttattgatgaattgcaagctggccttgcagatggagatatttatctttcagtttatttgaaagaggtctggtttaaaatttgtagcctacatttgttttatttattgtatttgtgtgtttgtgtttgtttttttttaagggtgagccaggtctagcccaacagtctaaactatccagtcaataccgagtgaagtggcagccagcactgttcactctgtgtcttttgaagtgccttgaaggcccagatgaaattttaaagggagggggtccatgtccttccctcccccaccccgcctcattctttaatcaaaggatgtcttctcccttgtttgagaatgaagaaactcgccacctctgacctacctttgcctttttctgtcatggagaatactcacccttcagaaacagaccaaaggccaaaacctgctgatttttctattgaaaatatgtccccttgcaaagaccctaaacaaaaagttaagtttctttctttcacctatttgtacaactccaagttacagctgaatctgtcgtgactttcctgagatctacccggggcttggctgtctgttctgggcactggctccgagttcccctcctgggatttgcaggagggcagtactgaacctgcattcttctccttgtaaatgtaggccgggtgcccctgttctccgggtttggaacaatacgaggttggtgctgatgggatttacttgcgtacgtgctcttcacaaaaacaccgtggatgctgaagttagagcacgtcgccacagagcttgacatcaatgttagagggtctcttactccccgcccagctgtgatgtttcatctgctttggttgttttggtggtcttttttaaaaatagagatttcacatctgcccagaccccactcaaaacgatttggtcaggttctggttggacaagtttaaaatcaaagtagtgcccggaattccctcaaaccacccaacttcatccaggaatacagtctgcagtgcagcaacagaaccgcttaccaagaactgtgcttacatacctttgtcatctctcttccccccttggaagttgtcctcagggggatttgttcctgtcctggggatttacctgggatggtggctgcctgtgcttttgctcatggccttgacagtgctctagttgctggatctaatggcctgtcttggtttctatcacatgagaaggggttgtttttttggggtgactcggactgaattccccatactgtttccacgccgggacaccatgttctccatcaagctaaagaaatcacgtgcctgaaactgtgcttaagttttgggggaaagatggagttcctatccagagcccccagatttccagaatcgagtgagcttcctggaaggagactgcgtcttctctcaattccagtcatctcagtcgttgtcgttaggtgacatgtgcactttaaatgctctcatcggttggcttcattttcaagacaatcaaatgtattgactgtgttttcttcttagaaaatggagagggttaaaaacatgcaaactgccactttcaacctttgccagtattccctctacccccgtgagagctatctggggggaagaatccttaccaaggtttttttggaaaggtacgaatcttaacttttttccccttctgtgtctcagggtaatactattcagagtcgcccctttgctcattttctcccgtatttgttaccttcctgaggcctcagtattagtcgtgagcacaaagttttgagacctttggcgttgtttcttgatgtgggaggggaggtgttagtgcatgcaagggttgaactagatagaccctgccttagtagagggtgggactataaccttagaggccagaacttgatccagaagttgctgtccacagaagtgctttctatttcatcatttttgtttctagggctctttttctgtagccaggtcttcccaaggattttagtatttgcattggagttgaggtttactctaatgatggtggcccagctgtgcccagaggacagccaggcaggccctgggagggagtttagaaagacagtcctggtgaatgggcttcaagtggtcacaaagagggtggctgtgaggtgaccccagacactgcagaacgatgtgcaccctctgcgttttggatgtccttggaatgtgggagcctagaaataaccctgtggatggaattggggcagcggctgctggagatctgtgtgccttgccttccttcagcaggaccgtctaggtgcgcagccacctatggatgcgtcccagccagccccgtcgctctcgtccatcctcagagacaaagaagagggcagggagtttgggcttggttttgaactttcctttcaatgtagcaaagcattcctagttaaccagagccttggaatctactgcctgctggccaggctttaaaatgaaaagtgttttaatgctgccataaaagggaggcgggggggaggaagggaaaataaaggcatctttccaagtactcatctaatttaattgtcaaaagattgataggccatgaattacttctccatctcactaagggttaaaggcgtgcaaccccccactggctgtgtcccctgccaccgaagtgagtgacctgccctacaaccaggtgggaccacctgtgctgcagtccggaggggcttctgcaggaagcactcaccccccacaccttccccggcctgagcttcccctacctttcgtcaccacctgagggcatgagcacaggccatggggcgtgcctggtgagtctgcctgtggttcaggcttagcctgtggtctcctgtgtgctgctgcccgcatgggatgcgcaggggaggcgtggggatccgcaggagggtggttgggatacaccggatacctctgctctcattgcttgtttgcaaatgctctatggacatttgtgtgctaaatcctattaaataaaaaagacgggttaaaacccagatgctgtatattcatttgtaattatgtataaagtgaagcagttttaaactgtaaagatttttttcagtgtgttttctcgaattttgccacaacatactggcttcgtattttatttatctttctttctagttaccagcttcagacccttgtaaagtctccctcagccctttcaaaaaataataaatttcctgtgaagttctggttggtgctgtgacttattcctattcctgattcctgtagaagggatactccccatccacccccatagctcttgaggagacgccttatgcaccgagcagctgctggggacgcatttcactctctcggagtgggacccaaacccagagagtgactgatcagccctaaagtcaaacaaacagtttatgccaagagccaaaacttcctatttccagataaatcaatacagtgaacaggaactttgctatagagcctgcgacttcccttaatgttagtttctctctcttcgctaacattctccaccccgtcccacccccaaactagagcaactgccagaaactaattcaagaagaaagatcctctctgcttgtagctcccggctgattcactgggtctgatcccggaatgtcggggctcccctggagacacacagggctccagctgtcactggctccaccagcacagcctgtgccttccatttttagattagattactagcttcctactcttccaggtctgcgctttctggacctataggaagacccttaagtccagctgggccttggagaactgtgccgctcgcagtaatgcagagaacctgggcaaagctgcctggagtccccgctctgccacttcccagctccccgcccctccctgacagtcaccaaaaagaaagtcctggccaggcgtggtggctcacgcctataatcccagcactttgggaggccgaggtggtcgggtcacttgagctcaggggttcaagaccagcctggccaacatggtgaagccccgcctctagtaaaaatacaaaaattagctgggcgtggtgaaaccccatatctatctactaaaaatacaaaaattagccaggcgtggtggcacatacctgtaatcccagctactcgggaggttgagggaggagaattgcttgaacccgggaggcggaggttgcagtgagccgagatcgtgccgctgcactccagcctggcaacagagcgagactctgtctcaaaaaataaaatcctgcccagctgccaagtgtctttcctttcaccacgaacttggaagtgcacgggtttctttgcagagtcttgtagccctggtgatagctgcctccccataagccagtaaaacactggtcttttttctctcgctcactgctcttggctgtcactgctgccctggcggtctcctcccccacagcagccatcctggcctgggtccgcggtggccctcatccacccagacaccctcagcagggcaagaggagtggttcccatggcctccctcctccgctctccaccgcaactggttctgagccagggacaggctctgtctgggaggcaagaagagcgagaagattccattctcttccagaacagcagagacacaaagcgcagagggccccaagaacactagccagccattcagtaggggcttaagtctctgcccactcctaacggatgctgctgtgcccagagcctctgccacagcacagacttg

SEQ ID NO: 23 - DNA, 377471 bp, Homo sapiens
  source 1..377471: mol_type = genomic DNA
ctgtaatcccagctgcttagaaggctgaggcgggagaatcgcttgaacctggtgggggcggggaggggaggtggtatggaggttgagctgagatcatgccactatactccagcctgagcgacagagtgagactctatatcagaaaaagaaaaaaaaaaaaaaaaaaaaaacagatactgccagagggaaacctttgctatttgctatgctttaggaattggtggacacttcctcctcactgctccctctgggatctgttcacatctcaacagcatttcttattttgtcctgttatttttttagcaatacatttattgagtgcctggtatataccaggcactgtaccaagggctgaagacagagaaatgaagcacgcaggctgagtggaaaggccacacaagaggctcgttgttatgtccccactccggggaagccagattgctggccgggcccacagctccatcagggctccttgtacacacgtcccattcggcaccctgaggccctgtcacccgctgggctgtgggtgatcagattcccagtcagtctattctgagagccgatcagtgcatgggatgcggcctggccccacagctctgtccccagatgttattcctattggacaggcggcccccatcagctgctctcttggggagagcaggagctgccaagaaggccttgcatgagctggtgagtcagcagcagcagggcagtggggcaggccgggagctgctgagtcactgtagcagtctgcaagttggtgaggtcagagcccctagagaatctgatgaaagctgggaacactctgccagaaaaatgctcagacacattttgcactgacttcaggaggctctcaggcctcagccacccatctgtggatgtcagaaggagaaccttagtaaacccaaagaggggaagtgacttaactgctcacaacaccaataaataatagaactgagatcagagccagttctcctgagtcacagtcctgtcaatttatcagattatgtccctgtgccaggcatctatcaaagcctccctttatttcaaggcccagctgcatttcacctcctgggaagcccccctgcttcctctagcctcaggcacctttctccttctctaaatttcagatgatttgctgctagagcccttactcttgggtgaacttggagggtgaaaagaacaaagactagattagatcagttgtttctgagcctgaaaaggaaagcaagaactgggctgtaatcaaactgaccatgttagcatatcttaaaaccaaagcttcttagctgggcgtggtggtgtgggcctatagtcccagctacaggaggcttaggtgggaggattgcttgagctatgattgacccactgcacgccagcctgggcaacagagcaagacactgtctcaataataatactaataataataactggcattaattagttgcctgttaatatacctgactgtcaactgatcactctatatacataatctctctttttttttttttttttttgagatggaatcttgctctgttgcccaggctggagtgtggcggctcgatctcagctcactgcaatctttgctgcccaggttcaagcaattcaccttcctcaacctcctgaatagctgggattacaggcgtgcaccaccatgcccagctaatttttgtatttttagtagagacgaggtttcatcatgttggccgggctggtctcaagttcctgacctcaagtgatctgcccgccttggcctcccaaagtgctgggattacaggcatgagtcaccatgcctggtcaatatatacatgatctctattatttatttatttatttgagatggagttttgctcttgttgcccaggctggagtgcaatggcacaatctcggctcactacaaactccacctcccggattcaagcgattctcctgcctcagcctcccaagtagctgggattacaggcatgtgccaccactcccggctaattttgtatttttagtagagaggggatttctccatgttggtcaggctggtctcgaactcctgacctcaagtgatccacccgcctcggcctcccaaagtgctgggattacagatgtgaggcaccaagcctggctacttatttattttattttaaaataaatatagcatctcactatgttgcccaggccggtctcaaaatggtctcaaactcctggcctcaggtgatcctcttgccttggcctcccaaagcactgagattgcagttatgagccactacacctagccaatctccaatctattctttctttctttcttttatttctttctttttttttttttggcagtctcactctgttgcccaggctggagcgcagtggtgtgatcacggctcactgcagcctcaacctcctagactcaagcaattcacccacctcagcctcccaagtagcagggaccacaggcacatgccaccatgcctagctaatttttgtatttttagtagagacagagtttcaccatgttggccaggctggtcttgaactcctgaccttgtgatccacccgccttggcctcccaaagtgctgggatgagccaccgtgcctggccaagcctccaatttttaaatcaaaggtttgattactcccattttacagatggggaaaccaagtctcagagaggccgacttgcctaggatgtccctggtcctgatagaaccaggattcaagcccaagatcatttggggtctgaagtctatgcaatgttgtctccattgagaatcagaattgcccaagggaagcagacacgaagtacaaagatccaccaggccaccgggggctgatgccatcgcactccacctttccacattcccactccacatgcctgagcagacgctatgactgaccagtctgatctcagaggtgcagtgtactgctcagctgtgcagataaatctgttaaggtgacagagctgtccccctggggtcagcttagtcttaaggacttaatctggtttatgtatcagactcttgtaagtttcttcaggagcctcaccctgaaaaccttaaccttttctttgggccaggtaaaccaagatccttggaccccagtgtcttcatcaagattgtgacaccctatgaagacacttcccaattggcccctggcctccacaatgacacctatcctaatcctcagggcagtggactgagaacacgcttggctcaggctggacgtttgtgtcttaaatgaccttggacacaagtgggctggaattagggcctctgaatctttaggttttctggagatttccattataagttatgatcctgtcttcagagtttctttatcttattaggagtttgactgagtactactctgagttcgaattacctcacccaggaacccaacacccaacccaaacctgagagctttgcttatagagagaggactggctttcatgtcagggacctggaatctcctccttgatctgcttcttgctggctgagtcacctctggggagaacttcacctccccatacttcagtacgtgcattacgaacatggacgtagtctggcaactgggaggagctgtgcccaccgaaggaatcattgtgcctttaagggcataaacctggtttgagatcaaatccgtccactgaaacattaattcaacaatcctcccacctcagcctcctgaggagctgggactactggtgtacatcaccatacccagctaatgtcttattttttgtaaagatagggtctcacaatgttgctcaggttggtcttgaattcccgggctcaagggatcctcccacttcagcctcccaaagtgctgagattacaggcatgagccactgtgcctggcagatttgtacactttatttatttatttatataataaatagagatgaggtctcgctatgttgcccaggctggattcaaactcctgtcctcaagcgatcagcccacctcggcctcccaaagtgccaggattacaggcatgagccacctcacgcagcaaattgtacactttttttttccccgagacggagtctcgctctctcacccaggctggagtgcagtggcacgatctaggctcactgcaaccttcgcctcccaggttcaagtgattctcctgcctcagcctcccgagtagcagggactacaccacatgtgccaccacacccagttaatttttgtatttttaatagagatagggtttcaccatgttggccaggctggtggcgaactcctgacctctagtgatccctccacctcggcctcccaaagtgctgggattacaggtgtgagccaccatgcctggccccagttgtacactttaaatgtgtgaattgcatggtatataaattataacgcaataaaaaaattttcttcttctttctgagacaaggtctctctctgttgcctaggctgtagtgcagtggcacaatcatggcacattacagcctcgacctcctgggttcacatgatcctcctgcctcagcctcccaaatagctggaaccacaggtgtgtgccaccacacccaaataacatttttttttaaatttttttgagatggagttttgctcttattgcccaggctggagtgcagtggcgcaatcttggctcaccacaacctccgcctcccgggttcaagcaattctcctgcctcagcctcacgagtagctgggattacaggcatgcaccaccacggctggctaattttgtatttttagtagagatgggttttctccatgttgctcaggctggtctcgaactctcaacctcaggtgatccgcctgcttcagcctcccaaagtgctgggattacaggcgtgagccaccgcacccagctatttttatttttttttgagatggagccttgctctgtcacccaggctggagcgcagtggtgaggtctcggctcactaaaacctccacctcctggattcaagtgattttcctgcctcagctgggactgcaggtgcatgccaccaagcccggctaattttttttttttttttttttttttgtatttttagtagagatggggtttcatcatgttggccaggctggtctcgaacttctgaccccaactgattcacccaccacagtctcccacagtgctgtgattataggcatgagtcaccatgcctggcctccttctccttcttcttcttcttcttcgtcttcatcttcatcttcttttttttaaaaaaagaggcaataaaatatttctcttaagcaatctagcttgaaagtgtccagaggaggagacgctaaggtccaaatcccgctctatcccttagctgtaccaactgtgagatcctgctgggcaccaacccttggtgtcctcattcagaaggtggacagcccctgggcctaggctgttgtgaaaatgagaggagggcagggaggaaatgcacctggcactgggcctgctgtgtgctggtcaggatgccatcagcaggaacaacaggcggaggaggctgcaggtgaatgatggtgttgggggaagttctttcccttttatttattaagaaggggaggagggtttcttaatggagaaagaaagtggggaaactatcccagagcctgtgcatcccaggggacctttgttctccaacctcccctctcccagccccacccccgccatgggcctatatctgctccacaagcccccacaagtgtagttacctggcagccccatccccatggttgcctcaccccagtgctggtagcaggacaagggggctgccgaggctggagtgatgtcaatgctgggggaggagagagaccctcagtccactgccaccaaccctgccaacagcagttgctgaggagcgtgctgtgctgactgtgggctgggctcttgcttcccctcatctgcccacagtccaggtgttcccagcatccccccatcccctcccccgcctgcccagctgctgagccagtgtctgacaacacccagacccaagatgtcagagcctgtcccctgcatcccagcgggagctgttcctggactcagaggctgtggtctacagaaaaggccctgataggagtctgagctggttcctagtccacactcatcacaaccaagctatgggactttgggcaaggcactgcgcccctccggttgcgctgtccccatcaccaatgtgactgtgggagccagggtacgggtcatccaggccccactccatggtagcacagtggccctggaggccagtgcttctggtggtaggtgtcccagatgatgctggccatttgcatgggctctctctggccctggaaggagtgagggcaagggttggaaccctactgtgtgcgggactctgtgccctccatgtgctccacctcatttaaacttcaccgaccccatgggtccagtgtgaataagtgggcaggctcttccaggcctcatggtcagacagtctggactcatatcccatctccaccatggactagctgagtgacccgggcagaatatttaccttctctgtgcctcagtttccccatctataaaatgaggccaaaatagtacctttctaacggagtagttgggacagactgattgaatacatgtcaactgggcagaacagtgcctggcacacgttaagcccacaataaggttaactgttgttattactagtcccatcttataaggaacttggggctcagggaagctaagtggcttgcccaaggacacaccgctagaaaatggtggggcagggctttccactttttttttttttttttttttttgagacagagtcttgctctgtcacccaggcgggagtgcagtggtgccatcttggctcactgcaatctctgtctccagggttcaagcaattctcctgcctcagcctcctgagtagctgggagcacaggtgtgaaccaccacgcctggctaatgtttgtatttttagtagagacggggttttgccacgatgcccaggctggtctcgaactcctgacctcaagtaatctgcccccctcagcctcccaaagtactgggattacagacatgaagttgatgttccttcccaccacccagtactggaccccttaaaaaaaatcctgagatgagcagtgtggtaaatgctgatggtctcaggaatggcattaaaaaataatcatgtagccaggcacagtgactcacacatctaatcccagatcccagcactttggtaggccaaggcaggtggatcatttgagcccaggagttcgagaccagcctgggcaacgtagcgaaactccatctctacaaaaaattatccgggcatggtggcaagtgcctgtagttccagctactcaggaggctgaggcaggaggatcacttgagtccagggaggtactgggtggtggagtgcagtgggagacaccactgcactccaacctgggtgacagggtgagaccctgtctcaaaataataagtggccaggcacagtggctcacgcctataatcccagcgctttgggaggccaaggcgggtggatcacctgaggtcaggagatggagaccagtctgaccaacatggagaaacctcgtctgtactaaaaatacaaaattagccaggcatggtggtgcatgcctgtaatcccagctactagggaggctgaggcaggaggatctcttgaacccaggaggtggaggttgtggtgagccgagatcgcaccactgcactccagcctgggcaacaagagcgaaactccgtctcaaaaaaataaataaataaataaaataaaaaagaaagaaagaaaaagacatgaaaataatgataacaaggtttattttctgattaccaaggcagtacagtagtcccccttgcttatccaaggttttgctttctgcagtttcagttacctgtggtcaactaagttccaaaaatactaagacattttgagagagagagagagagagagcatgctgacctaactttattacagcacattgttataattgttctacttatttattgttgttaatccgttactgtgcctgacttatgaattcaacttttatcacaggtgtgtatgtatagaaaaagcagaacatatatagggttcgatactatcacttaggtctcaggcatctactggggctctgggaaagtatcccctgaagataagggcgactacaatatttgttcactatcagtaactgagaaaatgcggaaaagcggaaaagagacaagtaaaaatatttttcccttcggggaaaaccctttcttctttggataactaaaaacctgatctcctgcatgttgtgagacctatcaaagggaggtggccttcactcaccttaagcaaggcttgacgttgtccaagggcccagcaggagatattgccagcacccaccctccccagggtaaacacagccccttccactccctcctggggccttcgggccccacctggggtcacagccttgaggatgcacactgcaagccacagcctgcagctgcttaggtcatgtgattcagtgaatgccaagccacagggctcagtcctcctcagaattgtctgggtcacccagaacaccctatgtgagccatgtgattcagcggggtcacatgctgagccacaggcatttgactccatgccaaatgtcatcacttccagaaagttagcaaaaaattatggtggctctggtgtggcaagcacagggcagggcaaaggagaccgtcactccgagataccaacacctgttaaaagaggatgagctgggagaagcggattgcttgagctcaggagttcaaggcagcaaggagctataatcatgttttttttttcttttttttttttattgatcattcttgggtgtttctcgcagagggggatttggcagggtcacaggacaatagtggagggaaggtcagcagataaacaagtgaacagaggtctctggttttcctaggcagaggaccctgcggccttccgcagtgtttgtgtccctgggtacttgagattagggagtggtgatgactcttaaggagcatgctgccttcaagcatctgtttaacaaagcacatcttgcaccacccttaatccattcaaccctgagtggacacagcacatgtttcagagagcacagggttgggggcaaggtcacagatcaacaggatcccaaggaagaagaatttttcttagtacagcacaaaatgaaaagtctcccatgtctacctctttctacacagacacggcaaccatccgatttctcaatcttttccccacctttcccccctttctattccacaaaaccgccattgtcatcatggcccattctcaatgagctgttgggtacacctcccagacggggtggtggccgggcagaggggctcctcacttcccagtaggggcggccgggcagaggcgcccctcacctcccggatggggcggctggccggacggatggctgaccccccccacctccctcccggacggggcggctggccgggcagaggggctcctcacttcccagtaggggcggccgggcagaggcgcccctcacctcccggacggggcggctggccgggcggggggctgatccccccacctccctcccggacggggaggctggccgggcggggggctgacccccccacctccctcccagacggggcagctggccgggcggggggctgacccccccacctccctcccggacggggcggctggccgggcagaggggctcctcacttcccagtaggggcggccgggcagaggcgcccctcacctcccggatggggcggctggccgggcagggggctgaccctccctacctccctcccggacggggcggctggccgggcggggggctgactcccccacctccctcccggacggggcggctggccgggcggggggctgacccccacctccctcccagacggggcggctggcctggcggagacgctcctcacttcccagacggggtggctgccggagggagggactcctcacttctcagacggtgcggctgccgggcggaggggctcctcacttctcagacggggtggccgggcagagacgctcctcacatcccagacggggcagcagggcagaggcgctccccacatctcagacgatgggcggccgggcagagacgctcctcacttcctagatgggatggcggccaggcagagacgctcctcacttcccagatggggtggcggccgggcagaggctgcaatctcagcactttgggaggccaaggcaggctgctgggaggtggaggttgtagcgagccgagatcacgccactgcactccagcctgggcaccattgagcactgagtgaacgagactccgtctgcaatcccagcacctcgggaagccgaggctggtggatcactcgtggttaggagctggagaccagcccggccaacacagcaaaaccccgtctccaccaaaaaaatacgaaaaccagtcaggcgtggcggcgcgcgcctgcaatcgcaggcactcggcaggctgaggcaggagaatcaggcagggaggttgcagtgagccgagatggcagcagtacagtccagcttcagctctgcatcagagggagaccgtggaaagagagggagaggagggagaggagggagaggagggagaggagggagaggagggagagggagagggagagggagagagctataatcatgttactgcactccagcttgagcaacagtgggagacccagtttcttaagaagaaaaaaaaaaaggaaaaagtatcccagcactttgagaggtcgaggcgggcggatcacaaggtcagaagtttgaaaccagcctggccaatatggtgaaaccccgtctctactaaaaatacaaaaattagctggaagtagtggcaggcacctgcagtcctaggtactcgggaggctgaggcaggagaatcgcttgaacccaggaggcggagattgcagtgagccaagatcgcgcctctgctctccagcctgggcgacagagcaagattccatcccagaaaaaaaaaaaggaaaaagttaatattaaatactaattttaagtaactataagtaattacaactattttcactttaaacattaagtaaaataatataaaattaaattaaaaatttaacctaaaaaatttaaattaagtaaatgttaatactcattaatctaattaaattaatgaaaatctgcaaaaacaaagcaaaaaacccttaaccatgccagcactctgtaagttctcaataacacatttaaaagtaaactgaggcacaataaaattagaaggtttatttattcatattttattttatttatttatttatttaaagacagggtctcactctgttgcccagactggagtacagtggcacgatcttggctcactgcaacctctgcctcccaggctcaagcaattctcctgcctcagcctcccgagtagctgggattacaggcatgcgccactaccgccggctaatttttgtttttgtttttgtttttgtttcagtggagacagggtttcaccatgttggtcaggctggtttccaactcctgacctcaaatgatccacctgcctcggcctcctgaagtgctgggattacaggcgtgaaccactgcgcccggtgtagaaagtttatttgagcaaatgatgactcatgaatcaggcagatccaaaccagaagtgattcatgagctctactgagagaacacagctgggacagatacagaagtaaagctaaggtggaggctgcagtgaactaagatcgccccattgcactccagcctgggcaacagagcaagactgtctccaaaaaaaaaaaaaaaaggtaaagccaagaaaatatttgattatttgatttggcagggcacggtggttcacacctataatcccaacactttggggggctgaggcgggagggtcacttgagcccaggagttcaagaccagcctcggcagcatggcgaaaccccatctcaaaaaatacacaaaattagctgggtgtggtgttgtgggcatgtggtcttagctgcttgggaggctgaggtgggaggatcacttgagcccaggaggttgaggctacagggagccatgaacatgccactgcactccagcctaggtgacagagcaagactctgtctctaaaataaataaataggcatgacacagtggctcacgcctataatcccagcactttgggaggctgtggtgggtggatcacttgaggtcaggagttggagaccagcctggccaacatggtgaaaccccatctctactaaaaatataaaaattagccaggcatgatggtgggcgcctgtaatcccagctactcgggaggctgaggtgggagaattgcttgaacccgggaggctgcagcgggagaattgcttgaacacaggaggctgagccgagatggtgccactgcactccagcctgggaaacagagcaagactccatctcaataaataaataaataaataaataaataaataaataaataaataaataaaatagagcttgcagtccctcagagagcaccctagtccaatggcctccttttacaggaagagaaactgaggcccagagggatcaagaggctcccccaaggtcacccagcaagaggctagagctgggacaaaacccccaagtttctgactccctgggcaaggctttttccactgttttggtctttggccatagagataatctgcttaaaaaattaacttgggatttcatgtaatcactgaggcctcagaagccttgcccaaggaaagacgaggagggtttattaagctttgttctaggagttacagggacaaggccacatagcagggctagaaactgatgtgtgccaccctcctccaggccagtagcagcttgtatttctagaaaaggcttaattttccaggtcagggcaggtcccagaaggcaccttctggggatgcggctggaccccgtgactcagctgattccacattattctctgtttccctccccactcagggtgactgccagattctggcctcccttgggccttcagagatggaagtgatcttaggttgttggtgggtcctacaacctatagtggaaaggtgaccatctaatttttttttttttttttttgagacagagtctggccctgttgcccaggctggagtgcaatggcgcgatctcggctcactgcaacattcgcctcccaggttcaagcaattctcctgcgtcagcctcctgagtagttggggttacaggtgtgcaaccacttccagctaatttttgtatttttagtatagatggatttcttttcttttttttttttttttagaaggaatttcgccctctcacccaggctggagtgcagtggcatgatccagtcttggctcactgcaacctccgcctcccgatccaagcgattctcctgcctcagcctcccaagtagctgggattacaagtgcgcaccaccatgcccggctaattttttgtatttttttagtagagatggggtttcaccatgcagcccaggctggtcccaaactcctgacctcgtgatccacctgcctcggcctcccaaagtgctgggattacaggcatgagccaccacgcccggcctgagatagggtttcaccatgttggccaggctggtctcaaactcctgatttcagatgatccacccgtctaggcctcccaaagtgctgggattacaggtgtgagccaccatgcccacttgtgtctaatttatcatcctcaccaggacacttttgagcatggccagggacatctggtcacccagccactgctatctctgagcatcatgatgggttgaagagtcagtgagccggcggttgaggacccactgtgcttgggtcccatacctgatgagaaagaagggcccaagtcccaggcctgcaaaaccacagccctagaaggagtgagagcacacagccagcatgacccaggaaactagaactgaaaccctcaaagctgaaaggtctagatgactgtccttactgtcccaacggggagcacacagctctgaaaggccaagggccttgcccaaggttaccccccgagaagatcagagactcaaacccaggttcccaactctcagctcagtgtgcgctgtgccaccggttccctttcatctgcaaaccccctgcctatctggaaggtgtgcacacagcctggaagcttgttatactggattgtaaaaattgttccttgccctggactggtgtgtggctttgtttgtgtgtggcttcctaatcctgcagcccctgtgggtggggaggtcccctttgcaaataagcgtgccaggctccagaacccagggagaaggcaaatatttcctgaactaaacctgctctcagcacttccactactactaccccagtccaggccaccatcatctcccaggtggcctcagtggcctctaagtggtatccgggatccttctcttttccccactcttcatcctccatgtcagagcatggagcctgggtgcagatcccacacaactctccctcagagctatccacgctcaaatcctggatgcacagcaatgtcatgtggctgccatcctcctgtctggcttccccgtgtcccctttctttctttctttttttttttttgtttgagatgtagtcttgctctgtcgcccaggctggagtgcagtggcgcgatctctgctcattgcaagctctgcctcccgggttcacaccattctcctgcctcagcctcccgagtagctaggactacaggcacctgccaccacgtccggctaattttctgtatttttaggagagatggggtttcaccgtgttagccaggatggtctcgatctcctgacctcgtgatccacccgccttggcctcctaaagtgctgggattacaagcgtgagccaccgggcccagccccccgtgtcccctttcttggtatcctgccacctcacacaagaaaggcacaactcccgcccaactgggccttccatggggcagtgccctgtgaacaacctcctacccccagtaggtagttagagaggtacctggaggcagagcctgttctcagcacactatgagggcaggaaccagggtcacactcctttggcccagataaggctcagaagtgagaacgttgtcatggggccacacccttatttgaatttcaaacatgaagccagggttttctgacagaaagaaagtcttgtcttgcttgactgtgttgatggggcgtgatgtggcaggcattcttcttaaagggactaaatgtgtagccccagttttgtgtggaaaaaatatttatttatttatttatttttatttatttatttttttttattgatcattcttgggtgtttctcgcagagggggatttggcagggtcagaggacaatagtggagggaaggtcagcagataaacacgtgaacaaaggtctctggttttcctaggcagaggaccctgcggccttccgcagtgtttgtgtccctgggtacttgcgattagggagtggtgatgactcttaaggagcatgctgccttcaagcatctgtttaacaaagcacaacttgcaccgcccttaatccattcaaccctgagtggatacagcacatgtttcagagagcacagggttgggggtaaggtcacagatcaacaggatcccaaggcagaagaatttttcttagtacagaacaaaatgaaaagtctcccatgtctacctctttctacacagacacggcaaccatccgatttctcaatcttttccccacctttcccccctttctattccacaaaaccgccattgtcatcatggcccgttctcaatgagctgttgggtacacctcccagaccgggtggtggccgggcagaggggctcctcacttcccagtaggggcggccgggcagaggcgcccctcacctcccggacggggcggctggccaggcggggggctgacccccccacctccctcccagacggggcggctggccgggcggggggctgacccccccacctccctcccagacggggcggctggccgggcggggggctgacccccccacctccctcccggacgaggtggctgccgggcggagacgctcctcacttcccagacggggtggctgctgggcggaggggctcctcacttctcagacggggcggttgccaggcagagggtctcctcacttctcagacggggcggccgggcagagacgctcctcacatcccagacggggcgtcagggcagaggtgctccccacatctcagacaatgggcggccgggcagagacgctcctcacttcccagatgtgatggcggccgggaagaggcgctcctcacttcctagatgggatggcggccaggcagagacgctcctcactttccagactgggcagccaggcagaggggctcctcacatccccgacgatgggcggccaggcagagacgctcctcacttcccagacggggtggcggccgggcagaggctgcaatctcggcactttgggaggccaaggcaggcggctgggaggtggaggttgtagcaagccgagatcacgccactgcactccagcctgggcaccgttgagcactgagtgaacgagactccatctgcaatcccggcacctcgggaggccgaggctggcggatcactcgcggttaggagctggagaccagcccggccaacacagcgaaaccctgtcttcaccaaaaaaatacgaaaaccagtcaggcgtggcggcgcgcgcctgcaatcgcaggcactcggcaggctgaggcaggagaatcaggcagggaggttgcagtgagccgagatggcagcagtaccatccagcttcggctcggcatcagagggagactgtggaaagaaagggagagggagaccgtggggagagggagagggagagggagcgggagcgggagcggaaaaaatatttaaagatgatatacagtctacagcaaaccaccaaatgcatcatttgcaagtttaggctaatgataaaaatttcaaaggggccaggcacatttgctcatgcctgtaatcccagcactttgggaggccaaggagggcggatcacctgaggtcaggagttcgagaccagcctggccaacatggtgaaacccccgtctctactgcaactataacgattagccgggtatggtggcaggtgcctgtaatcccacttactcaggaggctaaggcaggagaatcgcttgaacctgggaagtggaggttgcagtgagccgaggtcgtgccattgcactccagcctgggtgacagagtgagagtccatctcaaaaaaaaaaaaaaaaaatttgaaaggggttttttaaagggtgcctgtggacaaagtgtgatcactgttgtgtggaagtgatcctttacgatcccaatcagatcacaccatttgctgttcacacatctccagtggcctcttttgcctttgagcatgcccaggtcgtttccccccagtctggaggctcttgccctttgctcctgctccagatattcattctgcatctgctccctagcagctttctctctgccatcctgccatcttttcttcttgccatgctagcatatgtttatttatgagtggcagctgtatctctagtcactaggtcaggacctggtatattctaggcgccctggaagcattctccagaaacagaggtgcggtgaggagagtttggatccagtttggactgcagataaatgtttgtgaggctgggcatggtggctcacacctgcaatcccagcgctttcagaggccaaggcgggaggaccgccagagcccaggagtgagagaccagcctgtgcaacatagtgagacccctgtctaattattttaaaaaaggttgtttgtgaaatgactgagcaagtaaataatgaaggagtgaaggaacttggactgatgacctggaacacctgtacccttctcccactccaaaaaacccctgcccatcctcacaatccagggccagcatcactctttttttctggaagcttcctcagtatcctgggtatgggtcccctgtgattcatggaggacccccagtggggctcccaatggcacggcattaccagcacctgcacctgctgcctccccagtcacccctggctcccagggttccattgcacagtagatcctctagaaatgcttcacagacattgatgtggtgagggaggagggacagggtagcagtctcaccacccattacccccacccccgcctctcattcaacgaacactttgagcacctggcactttgatcccctcagtgccaggcactgagctccaaatcccagactctgtaacgtgcaagcaatccttactctttctattttaatatcttaacccatgtatttatataccttgtcaagtaaaatgtattcttttttaatgattctcaaaaggatactcattgaaaaaatttagaaaacaccgaaaaatgcaaggaagaaaaatacaattctcttacaatcctgtataatcctgtgcctctaggcctacagtcagctccaagcaacggcacagacacctcctcctccggatgaccaggattgcctctgggtttgtcacaagctggaacagggtcctttggaggatggggctctgtgaagaaaaagaggtgaagtgtttggattcagtctgagccaaaggtgagcgttatcagtccccgaaaggcctcaggggttggctgactctctgagaggccggcaagactggtgaagttctggaaggggacctggggggtggggcccggggacctggggggtggggcccggggacatggggggtggggcccgaggcccaggcagaggccaaacattgcccagggcccggctttagtctgcaacaaccctcattgttctctcactgtctctaggccgctttatctgggtttaaggacacaagactccgtgaaagacaagctagttcttcttcctgccccggcagtccactgcaggccgatgcagacgcaaccacttcctcagccgctgtggctgagagcccgccactgcactctatgggcttggtgctgggtatggagaggagggtatgacatagcccctgccctcagagttttttcctactcattatccctgctgtctctggggacttcttaaatgtcagcaatcattgtcatcttcactgttgcctccgcagccaccgcacatggctgcacctgggccatctcctctgatgtaaaggctgtgcagccaaaatttgcaattcttcccccagcttttaaaattgtagtaaaatatatataacataaaatttgccagcttcactgtttgttaagtgtacagttcagtggtatgaaatacacgcattgtgctgtgcaaagtcaccaccacccatctccagaactcgctttatcttgcaaagcagaaactctgtacccattaaacgataacgtcccatccccatcccccttacccccagcccctgtaatgcttgttcttttctttttttgagacagggtctcactctgtcatgcagtctggagtgcagtggcacgatcatagctaactgcagcctcaacatcctgggctcaagagatcctcctgcctcagcctctcaagtagctgggactacaggcacagcaccacacctggctatttttgttctttcctttttcttttcttctcttttttttttttttttgagatggagtctcactctgtcctccagcctggagtgcagtggcgcgatcttggctcactgcaagctccacctcccaagttcatgccattctcctgcctcagcctcccgagtagctgggactacaggtgcccaccaccatgcccggctaattttttgtatttttagcagagacagggtttcactgtgttagccaggatggtctcaatctcctgacctcgtgatctgctcactttggcctcccaaagtgctgggattacaggtgtgagccaccgtgcccagcccttttttttctttttttattactggcttaggtttgagcagtgatcattttaagttttttttgtagagatggggtctcactgtgttacccaggctggtctcaaattcctggcctcaagcaatcctcctgcctcagcctcccaaagtgtggggattacaagtgtgggccaccatgcctggtcttcctgtttttcaaataaaattactttttatttatttatttatttatttatttttaaagatggactctcggccaggcaaggtggctcacacctataatcccagcactttgggaggccgaggcaggtgcatcacctcaggtcaggagtttgagaccagcctcaccaacatggtgaaaccccatctctactaaaaatataaaaattagccaggcgtggtggcgggcacctgtaatcccagctacttgggaggctgaggcaggagaatcgcttgaacctgggaggaggaggttgcagtgagctgagattgcaccactgcactccagcctgggcaacaacagtgaaaccctgtctcaaaaaaagaaaaaagaaagaaaaaaaaaaaaaacaaaaaacagagatagagtctcttttggctctctaatgcccatgggatcaatgccaaattcatctccctggcagtcaatgctctattctccttctcccctccacctctccacctctccagcatgctcccacaacattctgccccagtgacctcaacctgcaatgcccacctgtcccatggacctccctgcccatgcctctactccagccaatactggctcatgtgtacacaccatgctgtgtaccgtctgtgctttgctcatgccgcttgcctcacccgagtgcctctcctcccctcggctcgtctggtgcctgtttactctgcaaggccagcgcatgccccctgcatcctggaggtctcctctcatcatcccagccccaccgggctcctgcagcatttctgaggtctgtatctttcagagagctacgctgcacattgcctgctgctcccagcaatccttacacctttcacccctctccccatgtgtttactgggcacctagggcatgctgaacactgtttgggataaaacagatccaaggcttaatgagacagataccatctctgccctccagaggttacagtctgcggtcaggggtgggggggggacctacaagagaaggggcagagaccacagggcatgtggtcagatttaaagggaggggctgcctcggaagccacccagtccagaattgggcagccgtagaaggcttctgggagcaggcggatctgagctgagacccaagcataggcaagagtcagcctggcagaggggtggggcacagagctcatcttccaggcagagtcctgggtgcacatgtgtctggcagaaggagggctgagctgggcatgaggtggaagtgagccgggccatgcagagctcagcaggcctgaaggggaagccatgactgtctcacaatgcctccctcagcatgtgatgctaaggggcagaagctggctcccaggcacatctcaagggcaccaagccaggcaccccacagaaggccttcaggaaccctagttaaataggtgactaagcaaattatttcatgaataaatgtaacaatgaactgatacatttgaaggaaaccagagtattccacccctaaaatatgcctccttgacatttttttgttttgttttgttctgttttgtttttttgagacagtcttgctctgtcacccaggctggagtgcaatggcacgatcctggctcactgcaacctctgcctcccaggttcaagcaattctcctgcctcagccttccgagtagctgggattacaggtgtgagtccaattctgtatttttagtagagacagggtttcaccatattggtcagtctggtctcaaactcctgacctcaggtgatccacccgccttggcctcccgagtagctgggattacaggcatgagccactgtgcccggcctttgtgtgtgtgtgtgtgacagggtcctgatatgtcacctagggtggagtgcagtggcataatctaggctcactgcagctttgacctctggggctcaatcgatcctgcccccaagtggctgggactacaggtttgagccaccatgcccagctaactgtaaatttttttgtagagacgaaggtcttgctatgttgcccaggctggtctcaaactccaggcctcaagtgattcccccgcctcagcctcccaaaatgctaggattacaggtgtgagccactgtgcccagccttcaaaagatatttttgaactgaggtttctcccacatgatgggcatagcacgtgttaaaaataaaattgcttctttttcttgtcaatctatcttttgtttgaggagaatgcctcaatcacgaacttgtgagggatgaacaaagatgatgtcttttctctccttcccatgcatgtgggaatgggtgaatccagggtttctagtgctgtttccctgagtctttttttttgagatagagtctcactctgtcacccaggtgcaatctcggctcactgcaacctctgcctcctgggttcaaacgattctccagtctcagccccctgagtagctgggattacaggcacccagtaccatgcccggcaattttttttttttttttagactggagtgcagtggcacgatctgagctcactgcaacctccgcctctgggttcaagcaattttctgcctcagcctcccaagcagctgggattacaggtggctgccaccattcctggctaatttttgtatttttagtagagacggggtttcaccacgttggccaggctggtcttgaactcctgaccttgtgatccactcacctcagcctctcaaagtgctgggattacaggtgtgagccatcatgcccagcctccctgagtcttcagtaacaatcttgtttggcctctgggcaggccaaggaggaggaaagttacttggagcttctctaccctgattttcaaggaagggaaaacagaacgaaccgtgagccaacaggccctgttttctttctcttgggagaaggctggccttggggagatgttctaggaaaggtcacctttccactccatggtgccaggtaggaaaccagaaggccttccttacaaacgaagggaacatttcttgccagatctctggaggaaaacttggagggaaaggtttgctgctatcctggagaagaaagataacagtactatccaaccccatctgacctctggaaggcaaagtcaggcacattatctttcaagccacgtgggaaggaaggcaagagctagaggagagacatggaggaggcccagggagggcaagtgattttcccaaagctacatagccagccttagacccagctatgagttgaacccacaggaccttctctgtccattaaaccacggggaaggaggacagaagcagggaaaactgagtctgtttgcaggaagaagattcagaaaagcaactggacttactagaaaacgaaagaaaaattatctttcgaggggcaccacggctccacctgcgcagaatgcaatttggcaatgaggagtcagggactcaaatgtgttcctttccgttagcccagtaatttaacagctgggaatgcgtcctaaggcctatggccaggaaaacactcatacagagatgctgatcagggcattagttcaatggtaaaagactggagatgagccaaatgtctgacaataagaaagctgttaagaaaatcaagacagtcacaacatgttataggcccaatcagagggccatttgtgagggctttttcataacggagaaaaatatgaacatcaagaagtcaggtgtagaaaaacaggatgtgaaataatttatgctgaataacaacagctattttaaaaaggcataggagaaagataggaagcaaatgggccaaaacggtactgcagtggcttttgtgggatggaactggggagaacttggggaacttgggttttttattcttcttgttggcattttctttaatatatatgtattgcttgttttttttccagacagggtttcactcttgttgcccaagctgggtgcaatgatgcaatctcagctcactgcaacctctgcttcccgggttcaagtgattctcctgcctcagcctcccaagtaactgggattacaggcgcgcaccaccacacctggctaattttttgtatttttagtaaaaacagggtttcactatgttagccacctgaactcctgacctcaggtaatccgcccccctctgcctcccaaagtgctgggattgcaggtgtgagccactgcacccggcctgcttttttctttaaaaatgaaaaatattttacacttcttttctgattataaaatcagtaatcagtatggccaggcatggtggcactttgggagcccgaggccggtggatcaattgaggtcaggagttcaagaccagcctgaccaacatggtgaaaccccgtctctactaaaaatacaaaaattagccaggctgtggtggcatatgcctgtaatcccagctacttgggaggctgaggcatgagaatcgcttgaacctgggagtcagaggttgcagtgagcccagatcgtgctactgcactccagcctgggcgatagaacaagaccttgtctcaaaaaacaaaaacaaaaacaaaaacaaaaaacagtacattctgctggtaaaaaaataaaaatacaaacaatatagatatgtatgagagtaaaaagtgaaagaacccctgtaattccactgcccagagataaccagtgttaatagttaatattttcttagtcatgcacacacacataaaacacaggcagtgaggtaagtggtcacattcctgtacctatatacacatatacacatggacacccacatatacacgtacacagagtgaagggaaaatagaatctcaggaccccaaactcactatgccaaagggaaaagttaagcttggaaactgagtcacaccaaaagctgccctttctttttttctttctttctttcttttttttttcttttgagacagattctcactctgttgcccaggctagagtgcagtggcacaatgtcagctcaatgcaacctctgcctcctgggttcaagcgattctcctgcctcagcctcctgagtagctggtattataggtgcccaccactatgcctggctaattttcttatttttagtagaaatggggtttcaccatgttgggcaggctggtttcgaactcctgacctcaggtgatccacctgcctcggcctcccaaaacgctgggattacaggcgtgagccaccacacctggtcaaactgcctttctttttgtttctaagcagatagctacaaaatagaagaccgtgtctccgctggtggcttccctcaccctgaccatgtacattaacaccttatcttcacaggtataagacaaagacaagactagaaatcacccctccagccacccagagacaaatgcagatttactgagccggcgacagaggcataattgcctgtgcctccaccctctcctttcataggtaacacgtggatttggtgagcactaatcaaagcctcacagaaatgtgcccccttatctcactgcctaccctcctttttttttccttccccactttccctcctgcctgctctttctccttctaatactgaagccctcaaaatcttctctgaaaaaattatgcggccacagatcccactgtggcatatgcctcttttttggggcacgtcctcagtcttgtcaaaatagacctctaaatattgatggagacttgcctcagacacttttctgggttacaacacgcatacatacatatacacatacatactacatatacacatccgtatctatacatgcacttatgcacatatacacatacctgtgtgtatatatatatacacacatggacatgcatgtatgcacaaatacatacacatatatacatgtgtgtatatagaactactgttttggaacttattttttcatgtaacatgatatatccatttctccacatcaattcatatagatcaatcagcctcatcccctttatatttaacattttttctttatttaaaaaaacctttttttttagagatggggtttcactatgttggccgggctggtctcaaactcctgacctcaagcaagcctcctacctcaggcttccaaagtgctggaattacaggcgtgagccattgcacctggccagactcaatctctgttttttttgtttgtttgtttgttttttttgagataagctctcattctgtcacccaggctggactgcaatagcgtgaacacagcttactgcaaccttgacctccccgggctcaagtcatcctcacctcagcttcccaagtagctgggaatataggcatgtaccaccaggcctggctaatttttgtatattttgtagacatcggatttcaccatgttgcccaggctggtcttgaactcctgggctcacacaatccacccgccttggcctcccaaattgctgagattacaggtgtgagccaccgtgcctggctgcctcttcctttcctttcctttccttccttcttcctccctttatttttatttatttatttatttatttatttatttatttatttatttattgagatggagttttgctcctgttgcccaggctggagtgcaatggcccaatctcggctcaccataacctctactcccaggttcaagcgattctcctgcctcagccttccgagtagctgggattacaggcatgagccaccacgcccggccaatttttttgtatttttagtagagacagggtttctccatgctggtcagactggtctcgaactcccgacctcaggtgatccgcccaccttggcctcccaaagtgctgggattacaggtgtgagccactgcgcccagcccttttttcttttctttcttttttctttttttttaacttaaagacttcattctatttgatggctgcttaatttccactgtaggatgcagaatttttttttggtaacaaatctcttatctctggatttttgtgctgtttccaattactttaatcatgacatatgactctgcaatgaacatatacctcggcacatgtgtttttcctagaagtgtaattgctggagcaaacagaaggcatgtttaatgcttttcctccacattaatacattccttttagaagattgtacaggtatgaatttgaaggtagtactcatttccccatatttatgcagcattagcattttatctttgccaatggtataggtgagaaaatgtttcattgttggtttaatttgtgtctctttaaaacttggtgagactccttttccatgattacagcctatgtggatttcttattttgtgaattgcatttatgtacatctttggatggttatttattagaactgcattgccttaataattgcaacagtaatataaatcttagtttttgtttttgtttttgttttttttgagacaagagtctcactctgttgcccaggctggagtgcagtggcacaatctcagctcactgcaacctccgcctgcctcccagtttcaagaaattctcccacctcggcctctcgaatagctgggattacaggcttgtgccaccatgcccagctaatttttgtatttttagtagagacggggtttcaccatgttggccaggctggtctcgaactcctgacatcaggagatccacctgcctcagcctcccaaagtgctgggattacaagcatgagccaccatgcctggcctaaatcttaatttaaaaaaaatatatatatacttttatatatacatataccttatatatatcttttatatatatacaccttatatatatcttttatatatatatatcatatatatcatatatatatatatatcatatatatatatactctcacacacacatatacatatatctttaccccatgatctccaatctgaagacagagaaatttgcatgaaggaggcacactcagggtggtctgagggcagagccctggcgtgggcagtgggagttcctgctccaggccagctttgcacctcgcctgctgggagggctcaggcagagcatccacctgggcttctgggagcctctgcttccttcttcaaggcctgtggctttcaaaatcttaatatggaatcccaccatgatagcccagtgtttctcaatcctggctgcccttttgaaaaactggaggaactttaaaaatatatacctcttctcagtccccagagatactgactcaatgcctgacttaaaaagctgctcaggcgggcaaagtggctcacacgtgtaatctcaaccctttaggagactgaggtaggaggatcgtttgagcccagtagttcaggaccagcctgggcaacatggcgagaccctgtctctacataaataataaaaaatattagccgggtgtgatggtccacgcctatgatcctagctattcgggaagctgaggagggaggatcgcttgagcccaggaggtcaaggctgcagtgagccagatcgtgccactgtgttccagcgtgggcaacagcaaaactcttgtctcaaataaataaataaaaaataaaaaacaaaacaacaacaacaaaagaagaaaaaggaggaggaggagagaaagaaagaaggaagaaaaagagaaagaaaattagaatgggaagaatttcagttttataactgtaactgattattttaaacgtatttttattgtaaaaataaaacccggatacagaatccaatggttctgatgtacggcttaactaattactacaaagtgaactgcctccgagaccaagaaaaagaactttgccagccacagcagaagtctctccacgcgccccaccccagtcactccttcctcttccataagtagtcatccttattctgactcacaggacgcattaattgcgtttttaacagcaagtccgctggaggtgggaggcgctcggggaagcttctagggccgtcagggcccattccctccgctaacacccctctctccccaaccctcaggttgcgcaagacctctccagcccggcgaacccgtggggctcagcagtcctcctccacgctcaagatgcagtttgatgcaatcctagaggacgcagtttcaagtttctcgagatagagaagcgaaagaggatccgaaaccgcgcttcacatctgaatctgatttcagattcctccggaatatagcggaagcgcggggttgagggcgcagaccggggcagaggagaggcgcgcaggtctgctgggacgcagcgcggggcgagcagtggcgcactcgtggcctgacgcatccgcgagactgcacgcggccaggcgggggcacgaacgggttggggcatgcgcgggcagcgtcgagtgggtcccttgggggtgggggtggggggcagtcgaactagggagagagtctgtggaagggctcagttgtcacttcacacctttccccgctgtttattgatctttaactctctctgtgtgtcctctctctctctctctctccctctcctctctctgtttctctctctctatcccttcctgtccaccctttggggccatctcttccaagaaacaaccgtctctcccagcccatgggaaattgtctctcctgcgaacttatccaacctgagggggtctcatccatgccgataccggctgcttgtggaaccttgtaagagttcttccctctccctgtaaaatggagataagctgtgtggtgctgaggccagcgccgggcacactcaccctcaccttcttcctgagagaggaaagagcctggagacctggattctacctctgcccccaacccctaccacagggtagccctgccaccacctgctggttctttgggcaagtcactcttttattggacttccatttcctcagctctaaaatgaaggaggtgagcccagtgtggtggcacctgtagttccagctacctgcaggctgaggcaggaggatcgtttgagcccggggggcagaggttagagtgagcggagatcttgccactgcaccccagcctgggcaacagagcaagaccctgtctttaaaaaaaaaagtgattaaaaaataaaaataaaatgaaggagttaaacaaactcaggaattttgtatgaatggcataaatgagcacattagaaggaagcaactttccttctctctttttttcaatcctgtacaggccagcttcccctctgccctctgctcccctcctccctccctaccatcctccagccccccaaagccctcccaatttgagcctccttttggaaaacatctctgagtatggtaccgttggtatcggtgactaagaggctccaaggatacccttctgggggatttccaaaataatgaggaagtccatttccaaaatcatgggaagtcccaactgggcctcccagacagttggccactgagtctgtcccctaaaggatctgcttgacttgcacagtcttaaaggcatcatgtctggtttttaaacataatttcagttagtagccaacagttcagatcaagggatcacacggcctgtttgacctgttcttgcagggtcatgcatgctccactgagccatgggaagtgtccacacccagccatgggagccctgtgggatctgaaactgacatttctgctttaggtgccttaagctgaagaaatgcatagtagcgggaattggagtgcaagtgagtgcagtaggggaagtattttgccataagaaaccctaagcctctatggacaagaaattctccaggggcagactggccttgaccccagaaatgtcacattggactcggccttggttttcctcatctatacaatggtcaatcagactagtggtttgttttttgtttgtttgtttgtttgttttctctgtcgcccaggctggagtacagtagtgcaatctcggctcactgcaacctctgcctcctgggttcaagcaattatcctgcctcagcctcccaagtagctgggactacaggtgcacgccaccacatccagctgatttttgtaattttagtagagatgaggtttcaccatattggtcaggctggtctcaaactcctgacctcaggtgattcacctgccttggcctctcaaagtgctgggaatacaggcgtgagctaccacaccgggctcagatttgtgatctttaagggtcctgtgaactcagcactctagacattttagggcctgtgcacttccgcggtaatggtttcttgttttgtcctcactcggagggcacactcctcaggctagtggcatgggccattgtcctagagtccctggggcccggccctaccatgaattctgcgtctctcccttcagcccttgtccctccctccgtgccatggcttggcaccgttcttgtctttgcaaccctccacaggcgcctcctcctctgacccttcaaaccttcctgccctcaaactctgtctccctacacctccctgccttccactctatgtttctgccttctccttcagcccacagatattactgaccatggttgccagccctatgttaggcctgggaattcaagagagaattagagccctctgtggactcccagctctactagggagagagacccacaaatagggatagagaggggtaaatgcttcagtgggtgagtacagggcctgcaaggccactcagctcagactgagggggtcagagagagcttcctggaggaggcagtatctgaagtgagaagcggagggaagtccaccaggcacacacagcaggtcggcgagagtgccgcaggctgaggatgcggcatatgtgaaggcccaaggaaaagcagagcacgcagcatgcaggccctggaggggtgaggctgcacctggggaggtctcatcccaaggctgacagcaggtttagggtctggaaacgccacatgccctgctgtctccctggctgttcaactccttccaggcctgacattcaccagctccttgaagacaagatcatgcagatacttttcagcacacacatctggtctccccggcaagtgcccagctctgggcctgtaccctcccagcagcaccacacaagatggccgacctgagctcatcaactgctcactggggtccctcccctgaccctaaccctgcttcagtcacccagtaagggatccctggcatgcaacatgtccttggctccagaggggttagatccttggggctccagcaggcagagctggagcctcgtggcgttttgagtactcatagggacggtttgggttgttgcagggatgtgggaggcactgctggtgtttgggccagagaccaggacggccgaacatcctgcaatgctcagagccgccctttggaacaacaacaacaaaaaaactgtccaaagtattctgattttcaaatgtcccttctgtagcgtcccctagtttgtcccactttctttccgtgtcctgaccgaaaatctagagtgccttgactgtttcatgacccaaccagctgcagggcttcccagcaggcttgaacccaaaccagggcctcgaacattcccaggcactgataaagaagtctaggttattgcccaaaaccctgaacaaaactggccccaggcttgagcccaattccttaaagcctcagaaaaattccacaccctgacctcatggctgtggacacacctaggtggacctccctttctctcctggctgcctgaggatgtgcacggccctgtggaagtgagctcccctaataaaagcctggactcatcaccccggcgcttcgtgcttctctctttggaatcccagctggccccccttcaggatgattcaggcactcccttgtgggaactcctctgccaccacttttggggcaaccctagctgagggctgggggtgagacaagacactttcacatattcgtgtcactgaaaaaccaaactccatttcacacctaaacatgaggtatttttgaatattttattttattttattttttatttattttattgtattttttgagacggagttttgctcttgttacccaggctggagtgcaattgcacaatctcggctcactgcaaactccgcctcccgggttcaagcgattctcctgcctcagccttccaagtagctgggattacaggcatgcgccaccacgcctgactaattttgtatttccagtagagatggggtttcaccatgttggtcaggctggtcttgaactcctgacctcaggtgatccacccacctcggcctcccaaagtgctgagattacaggcacccagcctattttttatttttgagacagagtcccactttgttgccaggctggagtgcagtggcacaatctcggctcgctgcaaccttctcttccagggttcaagtgattctcgtgcctcagcctcccgagtagctggaactacaggcgtgcaccaccatgcccagctaatttttgtatattcagtacaggcggggtttcaccatgttgcccagtctggtcttgaattcctgacctcaggttatccacctggctcgacctcccaaagtgctgagattacaggtgtgagccactgcacccagcctttttgcatattttaaaacatactctgagaacacaaatgaatggaagattggactttgttttgtagggaacttcgccaagagtttaaccatttcagagaatcacagcactgatagcggcttctctcccaggttcaggtcaccaaaacagcatcctccaccatcggcgttggtggctgggtatctgtgatgcttcccatgcaatgtgagcagctgcccactgagtcccggagtcctaagacccttccctcacaatcctaagacagtattgccttttcactgtgatggcattggtgacataaaagccactgtgggcagggtgcagcggctcgcacctgtaatcccagcactttgggagggtgaggcgggcagatagcttgagccgcagagtttgcccagaccagcctaggcaacatggcaagaccccgtctctacaagtaataataataataataataataataataataaaattatctgggcatggtggcacgcatctatagtcccagctacatgggaggcttaggtgggagaattacttgtgctcgggtggtagaggctgcagtgagccgtgatcgtgccgttgcactccagcctcaaaaaaaaaaaaaaaaaaaaaagccactatgggtgaaactgctggaacttcaggaagcaaggcagtggccacagactaggcaggtctctgtgcactcccctagataagcacttgtggggacaaaatatgcctgtgtcacttaagtacatacccttttgatctcctgtgtgatgaagcagggatgcacacagagcgcctgctccagagcaggggactggctcgcagaaacaacttgtcagaggtggagccacgcgagcctctggtccagggaacacagtttatcttattttttaaattaattaattaatttatttatttatttatttttgagatggagtcttgctctgtcacccaggctggagtgcaatggctcgatcttggctcactgcaacctccgcttcctgggttcaagcaattctcctgcctcagcctcctgagtagctgggatcacaggcacacaccaccaggctgggtaatttttgtatttttagtaaagatggggggtgtcaccatgttggtcaggctggtctcgaactcctgacctcgtgatctgcttgcctctgtctcccaaagtgctgggattacaggcgtgagccactgcgcccagccgagaacactgtttatacgggaaagaacgacgaacagacacatgatgggtattcagatctgggcatttggcagacagacattttctcataaatgagcaaagtgagcctgtcccttcaagaaactgaagcatttgttgccaatgataaagttggaacttggagctttcaagggaaaattagaattttggaaaatttgtgtacaccaccacaagcttgacaacttctcaatatttaaagatttttctgatgcgatggatggcagtgctaacaaatgctattttttgacactgttcagtgacatgtcatcttttgggagatgtatgtgatttaatgggtacaaaatttcaaagaggccacatgatgctgcacatcacatgtaggtaaaacagccattcacggtacaagataggccaggcacagtggctcatgcctgcaatcctagcaccttgggaggctgaggcaggcagatcacttgaggtcaggagttcgagaccagcctggccaacatggtgaaatcctagctctactaaaaacagaaaaattagccaagcatggtggcatgtgtctgaaatcccagctactcaggagtctgaggtgggagactcacttgaacccaggaggtggaggttgcagtaagccaagatggtaccactgcactccagcctgggcaacagagtgagagtccttctccaaaacaaacaaacaaacaaaagtacaagataggcccgtgcattttaatataataaagcatgaaatgttcattgatatgggttcagattctacattataatcaaccttaaagaaacaattgcttgttaagttttggcgtagcattaaagaagaatattcacaattatctgaaaaagctatcaaaatactcgtctttttttccaactccgtgtttgcgggaggctggattttcttcaatcaaaacaatatattgcgggacgcagtggttcatgcttataatcccagcagtttgggaggctgaggtgggcgggtcacctgaggtcaggcgttcaagaccagactggccaacatggtgaaaccccatctctactaaaaatacaaaaaaattagctggatgtggtggcgcactcctgtaatcccagctactcgggaggctgaggcaggagaatcacctgaacctgggaggtggaggatgcagtgagccaagatcacaacattacactccaggctgggcgacaagggcaaaactttgtttcaaaataaaaaaataaataaaaattttaaaagccccaacatattgcaacagactgaatgcagaagtagacatgaggctccaacagtctttaattaagacagttgcttgagagatttgcaaaagtgtaaaacaatgctgtttttctcactaaatttctctttgttttggaaatgaaggtatttttcgtaaaaatatgtttatgtttacatgtaatgagttcattattactttttgataaattaataaatatctgggtcctcaataattcttttaaaaatttttttataatttaaaatagagatgagggctgggctcggtgtctcgcgcctgtaatcccagcactttgggaggccaaggtgggcagatcacttgaggtcaggagttcaagaacagcctggccaacatggtgaaactctgtctctactaaaaatacaaaaattagccgggcgtggtggctcatgcctgtaaacccagctactcggaggctgaggcaggagaatcgcttgaaaccagggggcggaggttgcagtgaggggagatcacccccctgcactccagcctgggcgacagagcaagactccttttcaaaaaaacaaacatgtagcaatgaagccattaaaataatttattttttatttctttttctttttgtatgaatcgactttggataagaaaaaaatctactttttaaagagctgggtttgtgtggtgggacacctattgggtgcaacaatgtggagaacactgccctctggcggtcactcccagtatagtaccagagaggtggggaagcttcccttgctattctaggactgaccatgagacggcagaagaatacagtatttgcttcttttctatttctattatacttgcttttctttttcttttctatttctatttgcttcttttctattttctgttccttcttttctatttttttaaatttaagtgtagctaaggggactcactatgttgcccaggctgatccccgactcctcgggtcaagtgaccctctcaccttggtctctcaaagtgctggaattatgggcatgagccaccatgcctggcctaaaaccctgttcctaatctctaggttggtcctcaaagcctcacactcagccgggtgcccagggattggggcaggagtgacctcacagagctgcccacagtaatgatgcctgaagtgctccagctagcaggctaagccttgtcttctctgcctccacagcaactcatagcagccctagggaaggccacatcccagacccctaaacccagagagacagaacgcagacctgggtggcaaggactcagtaagttattgagtgccaaaccgggccaccactgtgcttggctttaggaaaacttgacatctataaaacttttaatctctagtaggtgctcaaaaaagccattcactctttcatgtaaccaagaaaagatgtttgagcacctgcaaagtgccaggcactgtcctagtcactgaggacacagtgagaagcaaaaggggcccaggtcctgcccacatgggacttataatttggtgagggaacaaaaaaaatttagtctcaaaaaaccaaagtttggttagatgctgtgaaaaaggatggggttctttaagggcacctgagagaggggtcttgtttttcctggaagccaaaaagaagcataaaggttgatacggtttggacgtttgtcctccaaatctcatgttgaaatgtgattcctggctgggcatggtggttcatgcctgtaatcccagcactttgagaggccaaggcaggcagatcacttgaggtcaggagttcgaggccagcatggacaacatggtgaatccccatctatactaaaaatacaaaacttagctgggcatggtggcacgtgtctgtaatcccagctactcaggaggctgagggaggacaatagcttgagcctgggagacagaggttgcagtgagccgagattgtagtgagccgagattgtgccactgctctccagcctggctgacagagcaagactctgtctcaaaacaaaacaaacaaacaaaactacctcttaacttagtcccctcgcatttttttttttttttttttgaaacagagtctcagtctgttacccaggctggtgtgcatgcagtggcacaatcatggctcaccttccaccacagactacaaacatgtgccaccacatccgactaagttttttttgttttttttgttttttggggtttttttttttttttttgtagagatggggatctcaccatgttgcccagtctggtctcaagctcccaagctcaagtgatcctctcatttcggccccctaatgtattgtcattccagccatgagccatggtgcccagcatctcctgctttttaactttgtttttaaaagcttcttgatttttgtttcaatttaatactgtcttggcaactttttaactttttgttgtttagtctcactctcttgcccaggctggaatgcagtggccagatctcagctcactgcaacctccacctcccaggttcaagcgattctcttgcctcagcctcccgagcagctgggattacaggtgcccaccaccatgcccaactaatttttgcaattttagtagagacggagtttcaccatgttggccaggctggtctccaactcctgacctcaggtgattcacccatctcggcctcccaaggtgctgggattacaggcatgagccactgcgcccagcccaattctgctattaaaggactctgatgcattcttcagtatgccaattgcatttttcagctccagaaattctgctctggatgttttttaattatttcaatccctttgttaaatgtatctgatagaattctgaattccttctctgtgttattttgaatttctttgagtttcctcaaacagaattctgtctgaaaggtcagagctctgtttctccaggattggtccctggtgtctaatttggttcatttggggaggtcatgttttcctgggtcatgctgctagcagatgttcttcggtgtctgggcattgaagagttcagtatttattgcagtcttcattgtctagccttagttgtcttttttttttttttttttttttttgagatcaagtctcactttgtcacccaggctggagtgcagtggtgcgatctcggctcactgcaacctctgccttccgggttcaagcaattctctgccttagcctcccaagtagctaggattacaggcgcctgccaccacgcctggctaatttttgtatttttagtagagatggggtttcaccatcttggccaggctggtcttgaactcctggactcgtgatccactctccccagcctcccaaagtgctgggattagaggcgtgagccaccgcgcccagctgtacccgtccttcttaggaagactttccagatattgaaaggacttgggtgttgtgatctaagctgtatctgctttagggggcacccacacccagtaacactgtggttcttgcagactcatagaggtactgccttgatggtctcagacaagatctgggcgaattctctggattaccaggcagagactcttgttctcttccctaactttctctcaaataaatggagtctctctctctgttctgagccacctgaagctgggggtagagtgacacaagcacccctgtggccaccagcactgtgacagtgctgcagacccaaagccaagacagcaatgggtcttgcccaaggcctgctgtaaccactccctggccactgcctatgacagttcaagggcctggggctctgcaatcagctggtggcaaagccagccaggcctgtgtccttccttccagggcagtgaggtctcccaggccctaggcaggtccaaagatgctgtctgcaagccagggactagagtccaaaatcttacaagtctacctggtgttctattgtactgtggctgagctggcactcaaatcacaagacacagccctacccgctgttccctcccctttctaaaggcagaggagcctcaccccgtggccaccaccaccacaggcccacagggagttctgccagagttcccttaaggcccaaaagctcttcagtcagcttgtggtgaatgctgcatggctgggactcacccttcagggcagtgggctcctctctggcccagggtaggcccagaaatgccacccaagagtcaagtcctggaattggggaccccaagagtccacttggcactctacccctctgtggctgtgctggttcctaaagtgtaagacaaagtcccctttacttttcactctgctttgctcaagtggaaggagcctcaccccacagccaccacagctgggaatgtgctgagtctcacctgaagccagcaagtctcagaggctcactgaggcccttgacatagctcctgggcatcgctgctggttattcagggcccaagggctcttcagtcagcagggggtgaatgctgccaggactggctccttcccttcaaggcaacaggttctcttcctgccaagggtgtgtatagaaatgtcatctgggagctagggcctggaagtggggtctctgactagtgccctatcctgctgtggctgagctggtagtcaagatgcaagacaaaagtcctccccactcttcccctctcctctcctcaagaggagggaaggggtctcttttggagccatgagctgtgcagcctggggttaggggaggggtgatgccagcatgcccttggctgccccagctgatgtctcaataggtcatgtgccctgccccccaactggctgagtgattttgagtgaccttgaacaagtcatgtcaccactcagagacagataatgggtatgaatcacgcattcattcaacaaacacttcttgggagcctgtcgttgcccaggcctgttcaggacactgtgcaggtagcctggagcaggactctcgctctgtttccaggctttccagtctagtggagaatctggacacagacatgaacaggtggtcacgctactgtagtgtgcacagagtgacccagcatggtagcctgggggacataggcgctcttgcaaaccaactcctggggactcggcccaaaccctttgctagccagtcctccgtggaggccatgatccgctgcagctgctgagcctggggtggtggatgggtgcagccggcctggggaaggagggtatggcacagatgccctccgtccccgatccccaggcatccctggaagtggctttggggaacaagtccctcgaatacccttgagattattttgtcatttgctctttttcttgaatatgacggggggtggggggcggcagatgtgtggctgttacagtttgccctgcttgccctccctctctccctccccattcccatcttccctccccattcccatcttccctccccattcccatcttccctccccattcccatcttccctccctccatctgccatttgcagaaccccttacacattttcccaaatcagcagccctgtgagttcctttggatcagacagctgaaaaacaatagcatcaattaaatgttcattgttggaaagcagaaagaactgtcgcccctaatcttgctcctcagagagaaccattgagaatatcttggaaaatagacatctagttttttttttctccatgtgtattcattttattttatattttattttattttatttatttattttttaagacggagttttgcttctgttgcccaggctagagtgcaatggcatgacctcggctcaccgcaacctttgcctcctgggttcaagcgattctcctgcctcagcctcccgagtggctgggattacaggcatgtgccaccaagcctcgctaacttttttttgttttttgttttttgtttttttttagtagagacggggtttctccatgttggtcaggctggtctcaaactcccaacctcaggtgatctgcccacctcggcctcccaaagtgctgggattataggcatgagtcaccgtacctggctttattgttattttttattttttgagatggattcttgctctgttgcccaggttggagtgcaatggtgccatctcggatcactgcagcctctgcctccccggttcaagtgctaggtgcagtggctcatgcctgtaatctcagcactttgggaggctgaggcaggcagataacctgaggtcgagagttcaagaccagcctggccaatatggcaaaacgccatctctactaaaaatacaaaaattagctgggcatggtggcgcacatctgtagtcccagctactcaggaggccacggcaggagcatcacttgaacccaggaggtagaggctgcagtgagccgagatcacatcactgagctccagcctgggtgacagaacgagactctgtctcaaaaaataataataataattaaaaataaaaattgatatatagttttacactatagggtcatattgtatatatttcataactttgcctttgcaatccatgtggttcctgtttaaagagagagagactgaggcagagaggatggagtgactgtcagaaaatgttggggcagagtggggcgtgaacccctcttcctgtcctgtccctcaggtgccttggagcaatttcagggcccacctaaagctggtagggcagaggctgacggcccattggactggcccctccgcctgctttccagatggtgcaggacatggagcctctgtcagccatgcagtgtgaccaagacccagcccccacatgagcacccacctcacatgccctcctggacacacagctgggctgcatgccatggtccgggcaaagcatccctaatgttttctctaacgctgaaaaacagacaaaaagagttcagaaatcacccccagatcccaccactctacacatcgtccagtaagaagggaaatgcccatctttacccatcagctcccagcaccaccgtcccatcccccacccctgccacattctaacctctgttaccggtttggggcatagtcttcccaaactttccccaagtttaagtagacatcactttacgggtaagtgtatagatagtttacagaataatacattttttccttcttaaacatgggattaggccgggcgcagtggctcatgcctataatcccaacactttgggaggccgaggagggtggatcacctgcagtcaggagttcaagaccagcctggtcaacatggtgaaaccctgtctctactaaaaatacaaaaattagctgggtgtggtggcacatgcctgtaattctagctacttgggaggctgaggcaggagaatggtttgaacctgggaggtggaggttgcagtgagcagagatcatgccactgcactccagcctaggtgatcaagcaagactccatctcagaaaaaaaaaatgggattatagagccaggtgtggggatgcacacctgtagtcccagctacttgagaggctgaggcaggaggaccactaaagctcaggagtttgagaccagcctgggcaacacagtgagacccccatttcaaaaaaattttttcaatgggattatgctcttaatattgatctgtattttttacactcagtaatatactatggatatttttttcagctcagtattgatagatttaccttatccttttccaatgactgcatagaatttcattgcatggacatagcataatttattcactcagttcacaattgatatatagctatacatataaacatagacaaaaatatagatagatgttactttcagttttcttatttttaaaaaacctttattttcggtttggggtccatgtgcaggtttgttatattggtaaactcgtgtcacaggggtttggcgtacagattatttcgtgacccaggtactaagcctcgtacccagtatttactttttcctgatcctctccctcctcccactctccaccctctagcaggccccggtgtctgttgttcccctccatgtgtgtatgtgttctcatcatttagctcccactcacaagtgagaacatgcagtatttgttgttctgttcctgatttagtttcctagagataatggcctctagctccatccatgttcccgcaaaggatatgatctcattcttttttttttttttttttttttttgagagagagagtttcgctctttttccccaggctgcagtgcaatggtgccatctcagctcactgcaaactccgcctcccaggttcaagcgattctcctgtctcggtctcctgagtagctgggattagaggcatgcgccaccacacccaggtaattttgtagttttagtagagatagggtttctccatgttggtcaggctggtctcgaactcccaacctcaggtaatccacttgccttggcctcccaaagtgctggaattaaaggcatgaggcacctcgcccagctgatctcattctttttttatggctgcatattttcagttttctgcattacaagattacagaaaacattaatatctacacctgtaactatatatttgtatcagtctctaactgacattgtcacgctttatttctatagggtcaacttctggaagtggaatggctaattcagagggaagtggatttaaaatgttagtacctgttgtcaacttactctcctaaatttacactcccatgcacagagggtgagagtgcctgctccccaggctccccagccctggatgtaaaaagttttctgcctttaaaaatagctgctctcaggaggctaaggcgggcggatcacgaggtcaggagatcgagaccatcctggctaacacggtgaaaccccatctctactaaaaatacaaaaaattagctgggcgtggtggcgggcgcctatagtaccagctactcgggaggctgaagcaggagaatggcgtgaacctggaaggcagagcttgcagtgagtcaagatcgtgccactgcactccggcctaggcaacagagcgagactccatctcaaaaaaaaaaaaaaaaatagctgctcttcccttctttgcaaggcccaaggttgcccgggtggaaacacatcagccccagcaggcagggaggaggccgagggaggcaggtgtggatcctgggagctccacttcctcatcccaagaaccggggactgtgttacctcaggggcaaagggctttgcagatgtgattaaggtgaaggaacttaagatgtggagataatactggattaactgggtgggcccaaactaatcacacaagtccttaaaagctgataacccttcccagctgtggtcggagagaggcgaagttgctggctttgaacatggaagaagaggccgtgggccaaggaacatgagcagcctctagaacttggaaaaggccaaaaaatggcctctcccctagagcctccaggagcacagccctgtccacacctggattttagctcagtgagacctgtgttgcacttcttgtctttagaactgtaagacaattaatttatgttgttttaaaccacaaagtttgggattatttgttacagcagcaacagaaaataaatacagtagacacaaaacagcctatcaccatggccagatttctcaggacctgggaggctaggcaggcctctctggctccaactccttcagggaagaaccctttagccaccaaaggcgctgtcttgctgtactgattctcccaccaagaaggccctgctgcctccctttggacttggccttcagctccttccagcccagccactacaccctccccacctgccttctggagcccagtcaaccctcagggagcacctcttccttgaacacagtgcgattgggctcacctgtacctcctcttttgtcgggaggatggagggccaaagagaagcataggataccttctctcctctcctgagccctgaatccatttggggcacacagacccacagagaacaagggctcgtgtgtacgcctgggcccttctccaggtgagcaccagccttgaagggcaagacagcgttgttcctctgtgccttccagagcttttacttgagttagatggtaaggctacctaagcagatgcttttaatggccctgtcacaccccttcagcccctgatgacagccacagttgtggtggaccgctgtaaatggatgctgatggtggctcatccctcaaagcttacgttctgtgaccctccactcctctgtcccaggactttctcaaaagctgcagaatcttgctgggcccctgggcaagcacagcctggtagggtggggaagctgacctccaggccatccacagccagtgcggggaggagccaggggaggaaccccagcctcccaccctgagatggaccattctgggccaggtgtgatgccttgtgcctgcaatcgcgctactcaggaggctgaagcaggaggatcgcttgaccccagccaggggttcaggatggaccattctgggatgacttctgtatgagacaagcaacctcaatcacacaccttttgtcagcatttccactgtccctgtggcagcccctcccttcctcacccctgcttcctgggaggaccccgataaactcttgcacccaagtccttgtctgaggctctgcttccagcagaagctgtaagggtctccagggtcataggaatttaatcaactgaacaatccacttgttttatagcctcctgacctgcagcctgtttcttcctaaaccccgtgcggaatgcactcgcctacttggttaaaatcagctcctggccgggcgtggtggctcatgcctgtaatcccagcactttgggaggctaaggcaggcagatcgcatgaggccaggagtttgagaccagcctgggaacatggtgaaaccctgtctctacaaaagatacaaaaattggccgggcacagtggctgacatctgtaatccaggcactttgggaggccgaggaaggcagatcacttgaggtcaagagatcgagaccaccctggccaacaaggtgaaaccccatctctactaaaaatacaaaaattagctgggtgtagtggcacgcaggagaattgcttgaacccaggaagcggggttcaaggttgcagtgagccaagatcgtgccactgcactccagcctggtgatagagcaagactctgtctcaaaaaataaaaatacaaaatacaaaaattagctgggtgtggtggctaattaattagttccagctattcgcgaggcttaggtgggaggattgtttgagccttgagcctgggaggcagaggttgccgtgagccaagatggtgccactgcattccagcctgggcaacagagtaagatcttgtcacacacaccaaaaaaaggctgggcgcggtggctcacgcctgtaatcccagcactctgggaggccgaggcgggcggatcatgaggtcaggagatcaagaccatcctggctaacacggtgaaaccttgtctctactaaaaatacaaaaaattagccgggcgtggtggcaggcgcctgtagtcccagttactcgggaggctgaggcaggagaatggcgtgaacccgcgagacagtttgcagtgagcggagattgcgccactgcactccagcctcagcaacagagcaagactctgtctcaagattaaaaaaagtcagctcctgacagagccctcaacttacagatgaacccaagtgacctctcctcatgagcctgctacggtctccactcaggaggagagatggcttcatcaccatcgcatgcggcccaggtgctggtgtgatggctcactgcatctacgccactggggcttggcctgtacacacgaccacacaacctctcccctctcctcacccgataaaaccctcctgtcactctccctggaagaggcactgctttagagaatcctcccagcgtccttactcacacctagtaataaaatgcctattgataacccctgggtttttttttccaggtaacaaacccaaactaaggtgctcaggaacgatcacaaccaaaacttgagtatcttgtatgccagagggactatcaataagggccctgagacctagcaaagtcacccctacaacacacaggcttggcagatggtttcagtctaatccagaccagagagacataacaaccaaatgtagccaggaaatttgattggatcctggatcaggaaataaaaaagacaatttaagggaaaagttgaagaaatgtgaatgtcctgtagactgcatgtttgctgatctttttgaatgaatgttattctcgggtgtcatgatgattctgtgattccgtaggaggatatctttgttcttaggagacgtacaccttcgtgtttatgggtgaagggccaagagattggcaagttactttcaaattagaaaatagacagaggctgggcatagtggctcacacctgtaatcccagcactttgggaggccgaggcaggcggatcacctgaggtcgggagtttgagaccagcctgaccaacatggagaaaccccgtctctactaaaaatataaaaattagctgggcatggtggtgcatgcctgtaatcccagctgctcgggaggctgaggcaggagaatcgcctgaacccagaaggcggaggttgcagtgagcaaagatcatgccattgcactccagcctgggcaacaagagggaaactccatctcaaaaaacaaaaacaaaagaaaaagaaaatagagacacagagacagagattaaaaggatggggacgggagggagaaaacatgctaaaatgtgaagaattggtgaaatctgggttgggggcacacaggtattcattgaagaagaacaggtgtgcacaaagggctgcaagcctccagattaaaaaaagaagctattcttgagacccgtggctcacgcctgtaatcccaacactttgggaggccaatgcaggcagatcatgaggtcaggatttcaagaccagcctggccaacatggtgaaaccctgtctctactaaaaaatacaaaaataagctgggcatggtggtgggtgcctgtaatcccagcaactcaagagcctgaggcaggagaatcacttgaacctgggaggcagaggttgcagtaagccgagattgcaccactgcaccagcctgggcaacaagagcaaaactctgtcaaaaaaaaaaaaaaaagaaagaaaagagaaagaaaagacagaaaggaagaaaggaagaaagaagaaagacagacagaaagaaagacagagaaaaattactggggagccaggaaggcctcatggaggaggtactatctaggatgagcctgaagtttgggtatgttcatggcagagacaaaggtgttcccagtacaggaaacaacacgtgcaaaggtgtgagggttagatgtgacttagatatgattagccgatgggttcctcctgcttcctgtacgaacaaaaccaattcattgagaccatggtactgcagtagagaaagaaggtagctacgtggaagacggagttattactaaaatcagtgtccccaaaggctcagaggttagagtttttcaaggacagtttggtgggcagggggctgggggagaaggaatattgattggttggggtgaaatcacaggggtgtggaaaattgtcctcgtgctccaagtcctctgggtgggggccacaggaccagttgagtcacgagtcggtggtccaggtggggtcagttgatcatcagaaatgcaaaagtctgaaaagacatctcaaaaggccgatcttcggttctacaagagtgttgttatttataggagtaactgaggaagtcacacatctgtgacatccggaacaatactgataataatttactgcgccttcatcttatcagagttcaggcccttctcataaccctatctttgtggacttttattagctttacaaaggtggtttagttttgggaagggctattaccatgcttgccttaagctaaaaactaaattcctcccaaagtcagcttggcctatgcccaggaatgaccaaggacagcttggaggttagagggaagatggagtccactctgtcagagttctctcactgtcataattttgcaaaggtggtttcactaacacaatgtggcaggtgttatgggttgggccactcatcacatattcaagttggatcaggtaggatcttagacaactacaaactcaccttttctcaagcccttgcagctagcagtggccatgtgacacaattttgaccaagaaagctactggggaatcccaggaaagtctttgctttcctgatacggctgcaaacttgtcttctgtctccttcctcctggaactcagacctaattgacgtggggctggccatgcaggagacagaaatatgtaaaacacaatactcaccaacagtagaatacacattcttctagaatacccaaggaatgctggtcaagataaaccatatggaccaggcatggcagctcatatctgtaatctcagcactttgggaggacaaggtgggcagattgcttgaacccaggcattcaagaccagcctgggtaatatggcaaaaccccatctcttcagaaaatataaaaaattaactggaagtagtggagcacacttgtagtcccagccactcaggaggctaaggtaggagaatcgcttgaacctgggaggtcaaggctgggggacagcctgggggacagagtgagaccctgtctcaaaaaaaaaaaaaaaaaaaaagacaaactgtatgttggaccataaaatgagtctcaataaacttaacaggattgaaacaatacagagtatgttctttgatccaatggaatttaaaaaattcttttagaaatcaatagcaatatgatatccagaaacaccctcaaaggaagcaagacttctaaatacatattctctgggccacggaaaaagtcacaagggaaattagaaaatatttataagtgaaagataacaaaagcacaaaatattaatttcttttagtagatttttatttatttatttatttattttgaggcagaatctcactctgttgcccaggctggagagcagtggtgtgatcttggctctctgcaacctctgcctcccaggttcaaacgattctcctgcctcagcctcccaagtagctgggattacaggtgcccatcaccacgctcagctaattttttcatattttcagtagagacagggtttcgccattttggtcaggccagtcttgagctcctgacctcaggtgatccgcccgcctgggcctcccaaagtgctaggattacaggcatgagccaccgtgcccggcctcttttagtagatttttaaaattttcttagagacagggtcgtgttctgtcacacaggctggagtgcagtggtgcaatcatagctcgctgcagcctcaacctcctgggctcaagtgatcctcctgcctgggcttcccaaagtgctggtgaagggttgacaagcattgcatgctgggttctagacagaaatacagttacaattaagcattaatcaggctacactttcgcccacttccttgtttctagaagtcagcatgagatcctgaccgattgcatccccattgttcccatagacagggtctctgacataagaatcataaggcttttcttgaaggatcacttcagatgtttttcagacgccaaattccagcagccagtttggacactcccacagaggaatgggatcagcatgggaatacagctgcttcctctcccagtcccatgacttcaccctgcacttttccaccaatcagtgatctccacacttcagcccactccaaaacccttaggaaccctagccccaggctcctcagggagatggatttgaggttctctcccatttctttgtttggtgaccctacgattaaacctctttctcttctgcagcctggggtcttgtattgacatgctgtgtgctttgggcaatgaacttctcacagttatactgaggtcacaggcatgagccactgtgcccagccctctttcaatagtttttttttttttttttttttttggaggcggagtctcgctctgttgcccaggctggagtgcaggggtgcaatctcggctcactgcaacctctgcctcctgggttcaagcgattctcctgcctcagccttcagagtagctgggattacaggcacgcaccaccacgcctggctaatttttgtattttcagtagagacagggtttcaccatgttggccagactgatctcgaactcctgaccttaggtgatctgcttgccttggcctcccaaagtgctgggattacaggtgtgaaccactgtgcccagcccagtagattttttttttttttttttttttttgagacggagtctcgctctgtcgcccaggctggagtgcagtggtgggatctcggctcactgcaagctccgcctcccgggttcacgccattctcctgcctcagcctcccaagtagctgggactacaggcgcccgccactacgcccagctaattttttgtatttttagtagagacggggtttcaccgttttagccgggatggtctcgatctcctgacctcgtgatcggcccgcctcggcctcccaaagtgctgggattacaggcgtgagccaccgcgcccggcctagatttttttatttcagaattgtatctggctattccaggatttccatgggcttcttaattcccctggtctcctgagagtctcgcccagcacacgtgcaggtcaggagttggcaaagaatcttagggtgttcttaggcagatgttgctctccccctccccaaccccaatcatggctcctactctgctgggatttcctccctccatccctagctgctggacctgcccttaactcctgttaccactagggatgtctctgagtcacatggcaccagagtagtttagaggcagtgaatctgtatggtcatctgcacaggtctgcagcaacctcaatccttgcctcctcagaagacagaattcaaccaaagggcataaggcagagtgagagaccaaggcatgttttagagcaggatcaaaagtttattaaaaaattttagagcaggaatgaaaggaagtaaagtacacttggaagagggccaagcaggcaacttgagagagtcaagtgcacggctcaacctctgacttgggattttgtatgttggcacgcttccgcggttttgcattatttctcccctgattcttcccttggggtgggctgtctgcatgcacagtgggatgacagcacttgggagggagcatgctcagtgtgtgtactgaagttgggcacatgctcacttgaggcattcttcccttaccagtgagtgttcctagaggaaggttacatgccagttaaactccaccattttgcctcttagtgcgcatgctggagcccactcacctaactcctgagatcttacccagaagctgcttcaggtgtttctatctattaggagactgcctttccctggcactggctgcaaccacttattattttagagagacagttaacaaccgcctgaccatcacctgatggttgcctgacattcctggtgttggggggccctgttgatgtctcgctaactatctactgtaacactctgacctctgatccctgaagccagtgtccagtggctttcatcctctggataccagagggaaaactggagaaacatggatgtcagcccacgacccccttctttcaagagtcacatccactccactctcctgctctgtgctgttctccaatgccttcaaagggttgtttttttctattgcatccagagctgtaattgtttttgttgttgttgttgtttttgagatggagtttcactcttgttgcccaggctggagtgcaatggcgcgattttggctcactgcaacctctgcctcccaggttcaagcaattctcctgcctcagccttctgagtagctgggattacaggcatgcaccaccatgcccggctaatttttcgtatttttagtagagatggggtttctccatgttggtcaggttggtctcaaactcctgacctcaggtgatccacccacctcgggctcccaaagtgctgggattacaggtgtgagccaccgcacccggccccaaagctgtaattgttattgccagatttgtccatctgccaatggcagataaatgactctgccactcctgggagccagaagttagtcttgcccttgtgtgatcatcttcccaggtattgaccatgtgacatatgcacatggtttcacacaaatggagccatacagctcatgtggctttatagtgcgtattttccctcagcaatacatggatgtctttcagggtccaggtttatagatctacattgtcctttttaatagctacatagttttccatagataatttattttcatagttccagttcagtacacaaacaataccgtgtaaaacactttgtgcagttctttttttattacttatttatttattaatagagacagggtctcactatcttgtccaggctggtcttgaactcctggccttgggcaatcctcccacctcagcctcccaaagtgctgggaatacagacatgagccaccatgcccagcccctttgtgcatctttgtgcacttcaccagttatctctgaggacaaatttctagaaatgaaattgctgtgtccaaggcatgcctccatgacaccccgtcaactttttgagagtcttttgagaccctcttcagtaagcaaaagaaaaacataaatattttctacccacctctggccccagtcacccaattccccttcctggaagcaactagcatattaatttctatataattcttctgggcataatccatgcttctatataaaaagatagtaatatatttctcccaatccatttcacacaatggtagccagctctgaacacaattctgcccttctggcacattctacttgttttgtttcagacacagggtatctctgtcacccagactagagtgcagtgacgtgatctcggctcacctcagcctcgacctcccaggctcaagcgatcctcctacctcagccttccaagtacaaactacaaacaggagccaccacatctggttaatgttttttcgtgtagagagggggtctccctctgttgccacctcctaaaatgctaggactacaggcgcgagccaccatgcctggcccttctagcacactttaattttttttttcctggtattttcacaaagatggaatggcatattttaaaagtaaagatactaagaataaaacacaatattgtaagctttataaatgggccccaaaatattttcccaagatgttttttaattagtccccaaagatggaagaaaagagaagtaactaatgttaacatgttatatcctctatctttgattgtctgtggacaagtgactgtcaatggcagagacgcaggacagagggagaggcgtgaccctgccacccatgtcctgctaaggccacgtctgtagccagccctgttctccaagaggagatgccccttcacctcccaaccttggccagggcttatttttatccaccccaatcaccagctagcctggcagccctataatttgggagtctggccacccctgtactatataattccctggcagaccttcagaccttaggttggcccctttgacttgcattttggtgatgctctgtggccagaagtctcttcggcaaattaggggtcagaacttggtgcagtggagtcaaaatgggggagggagtctggggcctttggattttttgcaatcgtctcacttccaccatcaaattgcatctggccgtcctggaaatatgagtgtaccaccacttctcaaaggagaccagttggtgctgagagtggggcttgctataaaaaggtgaggccggatcaggcgtggtggcctgtaatcctagtactttgggaggccaagacaggtgaattactggaggtcaagagttcgagaccagcctgaccaacatggaggaaccctgtctctactaaaaatatgaaaattagccgggcatggtggcacacacctgtaatcccaggaactcaggaggctgaggcaggagagccacttgaaccagggagatggaggttgcagtaagccaagatcgtaccactgcactccagcctgggtgacagagcaagactctgtctcaaaaaaaaaaaaaaaaaacctgaggctggaggagcagcatggggggccggtggctcaggtgctgaggcagccttcagtaaagcccatccctgtttcttgggcaccatcactttagagaggcagaattcctctgcagcctgtcttagattgatcatgtggctacatgctgtcatgcctcaaggaagacactaggggtcctttatatgcctgtcaaggttgtttcactaaaactcagcttccatcctacctctcctccagaatccacaaaataaagccctagctccttaggaagaagggaatctagtatgtgttaaattgaaatggaggtcaggcctgaagaatccccgagcagataaaaccagttcggcatcataaatgatctaagccttgcttgatttacaaacataagtaaaactgaacttaagctatttcttgtaaatgcttatattaaagaaaaacagaagttgaacttaaccaatcagaagcagccaacaagcttataaggctgaggcagacggatcacctgaggtcaggagttcaagaacaacctggctaacatggtgaaaccctgtctctactaaaaatacaaaattagccgggtgtgatggtgcatgcctgtaatcccagcccctacctgggaggctgaggtaggagaactgcttgaacccaggaggcagaattttcagtgagccgagatcataccactgcacttcagcctgggcaacagaacttgactctgtctcaaaaaaaaaaaaaaaaaaaaggaaaaaaaagaaagtgacattctttacttaccacaggtcaggaaccctgcaaatggactgtgtagacaagatatgaggccagttttcccaaggggcttttattgactttataagtcaaatttgattccttaaaggaaagcacaccattccagtcaaagccttggtaaaataatcaatttatcaaattgtgtcctgttgcaaaagaaaacagattcttattgcacttgtgtaaattactattttgccataaattaagaatactcacaaatagcttccaaattttggagaaatcaggtatgttccaaattttgttcacagggatatattttattcaattgctacaagctgtaaatagcttaaaagttttcttgactctgaaaaataaaacaaaggatcagcaatgttttaaccaaaaagtcagaaagattattccatgctattaactcctgttctgcttggtattcatgaacatttcagctgtacatgagagtcctgaatgttttttctctattctaatgtcacagtctccaaagttatcagaaatctgcattcaagagcacctgttaagagttctatagttgattataaaactaccttttgaagaggattgaaacaagacagcaattgtctgtgaatgacaaaaggtctttgggcctccattaaagccacaattgactaggaattttggttatttctgtggcatacaacaatttacttaacaattataactactaataacatacactaagttgtacaagaattatagagtttcctgtaattttggaacacataccaattacatatttatacaaatacagcacaaagaaaaccaaacaccatttcatatttgacaatgcttcctatatgatttttataccaaataagccaaatttcactgttgcattattgacgttaaacccaattcttaacaaaaccttatagacaaatgtatttcatgttaataagtttgaccataaggttaagattctcataaatctttttttataacctttacaatttttgttaaagagtaggtctgctctaagagagacctgttctgcttttattccaatgctcaatttacagaaaaaccgaataatacccctttaaccttagccaatatgttcacatgcagaatttcttttacaagattaacttttcacaaaccttccacaacttgcttaaactttcagctttatcttatctaacttaatgttttaatcctttaggcaaagccaaaaaaaattcccatgacttcttataatcttttaccaaaacacatttcactttctttatataccttgcatgtaaaactgtttcttcagtagtctcaattacatgttacatttttatgtactaggtgtgaagcctaagacatcagacagaagtgcaggtaagggctgactctttccagcatcacagggggcatggttatccacatgtccccaagcctttctagaatctaatgctccaaagtaggtaaattgaacaatttttaaaagtcaaagaagcaatttatgaccttaaagcatttagcaaacctaatatctgacctgcctaatttagatcaaatgtctaaattttcaagacacttttattttaccaataatctttttttgtttgtttttgagacggagttttgctcttgctgcccaggctggagagcaatggcacaatctcggctcaccacaacctccacctcccagattcaattgattcttctacctcagcctcccgagtagctgggattacaggcatgcgccactatgcctggctaattttttgtattttcagcagagacagggtttgtccatgttggtcaggctggtctcaaattcccaacctcaggtgatctgcctgcctcagcctcccaaagtgctgggattacaggcgtgagccaccatacccatctaccaataatctttaaaactgtctgtatttcccaaaaattacttaagtcatgtgaaccaaaaggcattacactttttatttttctgattaaatgtttgatttaagctctttttattattattattattatattttttgagatggagtctcactctgtcgcccaggctggagtgcagtggcatgatctcagctcactgcaacctccacctcctgggtgtacgccattctcctgcctcagcctcccgagtagctgggactataggcacccgccaccacacctggctaattttgtatttttagtagagatggggtttcaccatgttaaccaggttggtcttgatctcctgacctcggggcctcccaaagtgttgggattacaggcgtaagccaccgtgcccggccctttttttttttttttttttttttaattactggcttaggtttgagcaatgatcattttaaattaaattcccattccctggatggtggagaccaagaggaagttccgccacgtgtttacaaggtcaagctcccaaggacatttttcaacatgtggtctctgggcaagatggtcgccctgagtaacagaaaagataagaaagggaaaggagagaaagagagagagaaaagcattgcctgcagcagggtggggaaggcaaggtgctcagggaagccagagaaagacccacccatcgcctcaatgctgaattaaaagttcaggcagccacttgtcagttgcaaagggatcttttccagcagtcccatcagctctcaagtttccccttctagggaggaaaacactccccatgttccatatccctgtacatgcctaatcctgtcaccaacagccctcagcaaagagtgcaaggcagattaattcaaagacaatagcagttaacatcctatagtgccaaacccattctttgctgagagcgactttactgaggtggggggcctctaactccctaaactttaggaaggctttaaccttcctgagttgagacttgaacccaagttcaatcaagcgtccttactttttttttttttttttttttaggcagagtctcgctctgttgccaggctgtagtgcagtggtatgatctcggctcactgcaagctccgcctcccaggttcatgccattctcctgcctcttacctttcattaagaggaagctttaaacttctctgtcttaggagagactctaactcccctaagttgggcctctaacccaatcccatcctttatccaggtaaatgcatcccacttatctaaagtcaaccaatcagtgctatagtctattttctttgggttgggggtttcctcagtattgtcccttccgtggttcacctgaaagatgttaccagaaaggggtcccaatccagaccacaagagaaggttctttttttttttgaaatgtagtctcactcttgtcacctaggctgaagtgcaatcgcatgatctcagctcattgcaatctcaaccttccaggttcaagtgattctcctgcatcagcctccagagtagttgggattacaggcacctaccaccaagcctaactaatttttgtatttttagtagagacggagtttcatcattttagtcaggctgatcttgaactcctgacctcaggtgatccacccacctcagcctcccgaagtgctgtgattacaggcatgagccaccgtgcccagccaggttcttggatcttgcacaagaaagaattcaaggcgagtccataaagtgaaagcaagtttattaagaaagtaaaggaataaagagtgactactccataggcagagcaggcagccccgaattctatcccttgacagcattaacctctacctcctggagtgtcatttgctttccattctgttatcagatcctggcctgtttctccctagagtataagccccttgggaacagggacttagtctgctttgatcgcagctgaatctcagcacctagagcagggatggcatgttgagggcaatcagctggtttcacggaacaaattcaggggcaaagtccggatccgaacccaggtcttgtaaccacccaatgggttcaccttgcccgctgcctagacagacagagccgattcatcaagacagaggaattgcaataaagagtgattcactcagagctagctgtgcaggagactggagttttattattactcaaatcagtctccctgagcataacaggatcagtttttaaggacaacttggtgggtggtgggaagccagtgagctaggagtgctgattggtcaggtcagagataaaattgtagggagtcgaagctgtcctcctgtgctgagtcagttcctgggtgggggccacaagatcagatgagccagtttatggatctgcatggtgtcagctgatccatcaagtgcagggtctacaacatatccaagcactgaggttaggagcagtttagggagggtcagaatcttgtagcctccagctgcatgacttctaaactataatttctaatcttgtggctaatttattagtccttacaaaggcagtcttgtccccgggcaagaaggaagtttgttttggtaaagggctgttattgtctttgttttaaaccataaactataaactaagttcctcccaaagttagttcagtcaacgcccaggaatgaatgaggacagcttagaggttagaagcaagatagagtaggttaggttagatcttcactgtctgtcataattttgcaaaggcagtttcagtttgcctgatgctaaatggttgctttttccatctgccatcctactacaggggcataatgagattatgtgatggaaggaggctgcagagttagctccagctgcgctcaggatttcaacccaggtcctccagtcccaggctgtcctggtggagtccctagtgggtggggctgcaaaagagtttgccaaacacccacgatccttcctcctacctcttgcctggagagtttaagcaaggggatttgagggaatggtagacatctgggatatttctgagcatggcagcaaaacccattcaaagttctccagcagggtaagggttactaatgtggccggcccctgtatgaaacccttggccagcttggactaaaggccagtatccagtgccaggcctgcagtcacagtcagatgggtctgtgtgttcctcaccagcacaaagcggattctggtcaccatggaaactgggcccctgggcttccttctaaggacatctttggacagcatccaaccagcccctcctgcccaagctggccctgaggagaggctcagagtggcctggggtatccaggattgcagggctgacctgttgactcagtttctgatcaggattccaagaaaggagagattgccaggattagcacatttggcagggggttgtgggtggctggaaccctgtgctcaagactggaaaataggcgactgcagagtcactgattccagagctacaagggaccttcagcatcaactcatccaatgtctttgttgtccagatggggagactgaggcccagagaggggaagcaacttgcccaaggtcatgcagggtgtgagtgtcagagtggaaatggttttaggttggattccctgaagcaaggccctgagtctaggatttgtgtgaaagtgattatttggaattctttgggagtagggagagatggaggccaaacaaaggggtaatgtcaagtcatgtaccacaggtggggaggtggggggtacccagtcctggagagagctcagctgtggaggcaacgtgggtcacacctatgaagttgtcagaacagtcactaccttttttttttttttttttttttgagacagagtctcactcttgtcgcccaggctggagtgcaatggcgcgatctcggctcagtgcaacctctgcctcccgggtttaagcaattctcctgcctcagcctcctgagtagccgggattacaggcgcccagcaccacgcccagctaagttttgtagttttagtagagacgagatttcaccatgttggccaggctggtctcgaactcctgacctcaggtgatccctccaccccggcctcccaaagtgctgggattacagtcgtgagccatggtgcctggccgaacagtcactaacactaaaaaagaaaaaaaaaaaaaaaaaacctgacaaatagagccagagaaggccatgaagagatggttctcatgcttgtatgcctgataacaaaaattatcacaaaagactgcaaaaccacagccttgcagaaaggccaatcacaaccttacacaaaaagtctttctgcaaggacatctgcctggcaactgcctgtccaaacttgaactggcgtcaccatgttactgatctttgtagccaaggataattatttcaagaccattatgtaatcctcctcatttttcccttagaaacctctgtcttcttttacctccctgaatacccgcatagtttactatggctgcatattcccaaagcaatgctccatttccaaatatattccttttcttttggagagcatctctccgttatttaggttgacacatctcaaagttatcctgatcaggtgacaagggagctggaaattctatggctccccacttgccagctgttgacaaaaatctgccccaggagagcgtgaattcccaggtacttccagggctccctcctgagcacgggccaggcaggtgatgcagcccaggacagtccttcaacaaagagacgcagacgctggctgtagggggtggagcacactgggagagggtggcccagaagtgaagggagcaggaaggaaagatctcatctgctccagagttcaccaggttctctctcattgtacggaggaggaaactgatgctcagagaaggcaagtcacttgcttaaggtcacacagttagttaatagaagaggcaggcctgggaccaactcccctggctccaagtcctgtgagtttcccattttactcagatgtttctcatcacgttcccaccctgagctgctggaaatcagggaggtgaaagaagagaaagccaagaggagacaggcaatgcttggacaagccattggtgtgtctggctccaactgacacaccggctctgcacacaggaggtgttctagaaatgctcagagaggccaggcgcagtggctcacacctgtaatcccagcactttgagaggccgaggtgggcagatcacgaggtcaggagttcgagaccagcctggccaacatggcaaaaccccatctctactaaaaatacaaaaattagccgggcatagtggcacatgtctgtaatcccagctactcgggaggctgaggcaggagaattgtttgaacccaggatgcggaggttgcaatgagctgagatcgcgccattgcactccaggctgggcaacaacaacaaaactccatctcgaaaaaaaaaaaaaaaagggaaacgctcagagaacttgctggccaatgtgcacatcctccaaacgcaccagaccagtgagtgcacagaagtcagaggggcagaggcgaagctggagcacagagcacttggttttgctccgtgttgcagaatcccaagcagggagggtgctcagagctatggcaccatgcccttgatgtgtggaaggggaaactgaggccttaagagataatagacacccaaggctgtgtggatcagtgagcaggccagagtctggtctgtggagtcccatgtggtcaccgttcccttaggtcccccaggactgggcaccggctggttatttctagaatcagataactcatgtcccctcctctccatctgcctggccctgctcacaccttgttcatctctcttctagagcatcacaggtcctgagggcctccgttcctctagttctcctcctgcaatccaatcctctcgctgtctacagagcaccactctgtggggcacttggactttctgtctctcaggcactccccatttcacaccttacatttcaaccctgaaactcttgcagttcccgcagtgagacctgctttactgcccaccagtctgcctgctccaaggtccctgttcttatctgtcttggtcccaatgtatccccaatatttggtccagtgcttggtctgtacgagatatttgtcaaacttttgatgaatgtggggccagcttcgtgagtgtgcgacctgtgcaactgcacagggccctgggcttagaagggctttgcacttgtatgctctgctgatgctgtcttgaagttcttaataatttgaacaaacatacctgcattttcatttttcacaaggccctacaaattatgtggctagtcctacatgatgaatgaatgaatgaatgaatgagtgaatgaatgaatgcctctgtgtctttgcacatgctgttcccttttcaccagggacaccgattccaatcttatttggttaaggtcccggcacactaaagatgctctcaagaaaggacagaggacagagatgtgggcagggttgggggtaacatgggatgggaaccatctagggactagcacttggggtaagcttggaggcctttggggcaagaagaggtagggggctactggagccagggagagctggatccagggaggagtaaatattcccacctctctcacctccctgcttccatcttctgccagtgcgtttcataggctgagtccagctagaagccagaggatagggcccaggtaatgccgcctgtagaggcccagccctttggcatagagcaagctgagaagcgcagagagtggatggggtgtgaaggaggcaaatggaatcaccataaaacctgtgttaagcatccttcccctgcaaagccttccgtggtgtccctgggtataaggggattcctctccctgcgtctcacacaatgacagtagcagtaagtgtctcacactctgtgccagccctgtgctaagtacctatgctgtagagtccgttattgtcccatcttacagatgaggaacctgagacgcagaaaggtcacagccagcatatggcggaactggcatttgagctcagggctgcctgaagctgaaacccctgttttttttttttttttttttttgagacaaagtctctcggctcatcgcaacctccgccttccaggttcaagcaattctcatgcctcagcctcctgagtagctgggaccacaggcacacgccaccacacccagccaattttttgtaatttttgttttgttttgtttgagatgaaatctcactcttgttgcccaggctggagtgcagtggcacgatcttggctcactgtaacctctgcctccccggttcaagtgattctcccgcctcagcctcccaagtagctgcgattacaggcgcccgccactacgcctggctaattttttgtattttggtagagacggcatttcgccatgttggccaggctggtcttgaactcctgacctcaggtgatccaccctccttggcctcccgaagtgctggggttacaggcatgagccaccgcatccggctgaagaaaatattttttttttttttttttttttttttttgagatgggatctcactctgtcgcccaggcaggagtgcagtggcgcgatcttgcctcactgcaacctctgcctcttggcgattctcttgcctcagtctcctgagtagctgggattacaggcgcctgccaccatgcccagctgctttttgtatctttagcagagacagggtttcaccatgttggccaagctggtttcaaactcctgacctcaagtgatccgcccacctcagcctcccaaagtgctgggattacaggcatgagccactgtgcccagcgaagaaatttttaaacaggtaaaaaactaaaaggaattgtctaatgagcccaacatacccatcatcagcttcaacaatgatcactacaaggcacaggtttcatccacacttccacccactcccacccacccatgcctccctctcttcagagtgtttggaagggaatcccacacatcaggcacatcattttaactgtatttccgcacataactctatacggcaaaggctccttttcacaaaaacagaaccacaatatcattatcacacctatacaatgtaacgacagtttcttaaatcatcaaatatgccatcaaaattcatatttcaccaaattattttataaatctttaaaaaaatacagtttgtttgaatcaagatataaagtccacgcattgtttttatttttatttatttatttgtttatttatttttgagtcagggtttggctctgtcgcccaggttggagtgcaatggcatgatctcggttcactgcaacctccgtctctcaggctcaagcaatcctcaggtgcaccccaccatgcccggctaatttgggtatttgttgtacagatgggttttcaccatgttgcccaggctggtctcaaactcctggcctcaagtgatcagcccacttcagcctcccaaagtgctgggattacaggtgtgagccatcgcacccggccgaagtccacacattgtgtttgcctaatatgcctgtgttgtaaatgggctgtaagcccctctcatggagcctttgagtatcatcccaaaatgaactacgaaatctcacttggagaggcatatgcagtggaagggtttatattcacaggtcctggagacaggagatacaccatgccacatggagggcgactgggaagcagctcccaggatccactgagcaggtggggagctaaaaggcataaagatttcattgtgtgttgagtggccctaagtcgcagttatgggggttgtggaataaggagagagggacttatgggagggaccagccttcccacactggggcacctggccacctggccacctgggtggggtgttcacagcctgtttgtgaggatgttgaagcttcaggaaaatacgaagtttttcaaatatataatacagtatcccttaggtttcctttttttccccttcaatcttgtttattctgtaagtttcccttatatctcttcttttttttttccttataatttctatttggtggtggttgttgaaaaccttgagttttccatcggtagagttttccgcagtctggagcatgctgatcttggtggtatcattttagcaatattcttctgtcctttatatttgttttgtttcagagacagggtcttgctctatcgctcaggctggagtgcaatggcatgatcatagctcactgaactcttgaactgctgagctcaagcgatcctcccatctcaggctcctgagtagctgggactacaggtgtgtgccaccatgccacggtctctcatactttatcagattctaggtcatttcttctctcctcttcttcctttttctacttcttttcagcaagattgtttaataggtgacactttgttcttccatcaggagatacataatacttgatgatctttttttgtgatattagcaactgctggtaatcattgcctgcattgtttaactcattacggattgcaaaacagtgatattccacttctatggttccttgtttattagttggaatacttcacatacttcatgtaaatgattcaccaatcttttcagttttctgaagattgtttttttgtcagctgcagtggctcatccctgtaatcccagcaactcaggaaactcaggcaggaggctctcttgagaccaggaatgtaagaccagcctggtcaacaaagtgagaccctgtctctaaaattttttttaaaaattagctgtgtgttgtggcatgcacctgtggtcccagctattcaggaggctgatttgggaggattgcttgagcatgggaggtcaaggctacagtcagccgtgattgcatcacagcattccagcctgggtaacagagtgagaccctcactcaaaaaaaaaaaaaagattgctttttagtggattatccagaaaaggctcaaagaaacaatattccttgggtttttccatgttcataatagtttatttatgtcttttatacttaaaggtcagtttcactcagtataaaatccttggttcacatttcctgagacatgtcattagattgtcttctggcataaggcattgctgttgaaagtaagatgacaatttatttttcctttgtttataagtgatttgtctgtttctttttttctatttatttatttatttatttatttattttgagattgagtttcgctcttgttgcccaggctggagtgcagtggcatgatctcggctcactgcaacctccacctcccaggtttacgagattctcctgccttagcctccgcagtagctgggactacaggcacgcaccaccacgccccgctactttttgtatttttagtagggatgaggtttcaccatgttggccaggctggtctcgaactcctgacctcaggtgatccacccacctcaacctcccaaagtactgagattacaggcttgagccaccgcgcccggactgatttgtctttttcttgaattccctgcattttttcctttttcttcaatgcccagtagttttcttagacacaggtctcagggttgatttgtccaggaatacagtgtgcctcttcaatagttaatttctttttttttttttttaagacggagtctcgctctgtcgcccaggctggactgcagtggcacgattcggctcactgcaagctccgcctcctgggttcacgccattctcctgcctcagcctccccagtagctgggactacagacgcccgccgccacacccggctaatttttctgtatcattagtagagacggggtttcaccgtgttagccaggatggtctcgatctcccaatgtcgtgatccgcccgcctcagcctcccaaagtgctgggattacaggtgtgagccaccgctcccggcccaatagttaatttcaagccatgttttatgtgaggatcatttctttcaattatagtttggtttttgttctatctactggtttggttttctttagagttcttcacagcccctttatttctagattttaaattgctggcagggtggggtggctcatgcctgtaatcctaacattgtgggaggccaaggcgactgggtcacctgaggtcatgagtttgagaccagcctggccaacatggtgaaaccctgtctctactaaaaatacaaaattagctgggcatggtggcgggcgcctgtaatcccagctaattgggaggctgaggcaggagaatcgcttgaacccaggaggcagagtttccagtgagctgagatcgtactactgcacttcagcctgggcaacaagagcaaaactgtctcaaaaaaaaaaaagccctctttttatttttattttataaaaaaattaatttttagagacagaatttcgctctgtcaccgggctggagtgcagtggtactatcatagctcactgcagctttgaacttttggactcaagtgatcttcccacctcagcctcccaagaaggcaggacaataggtgtgccccaccatccctggctaatttaaaaattttttttttagagacggtctcactatgttgcaggctggtaaatgccctcttttgtatcttatttttctcttaaagtcttatttattgtaattattctctttcatttcttttgttttcatcttcatttctgaaattgttgttcttttatatttaattatttgctgacctttataatctttttattttttaagagtcaagggcaatcccagcactttgggaggccgaggtggatggatcacctgaggtcaggagttctagaccagcctggccaacatggtgaaaccttgtctctactaaaaatacaaaaattagccaggcatagtggcaggcgccagtaatcccagctactcagtggggaccgaggcaggagaattgcttgaacctgggaggcggaggttgcagtgagccgagattgcgccatctcactccagcctgggggacaagagcgagacttcgtctcaaaaaaaaaaaaaaagagtcaagatctcactctgtcacctgggctgaagtgcaggggcacgatcatagttcactgtggcctcgaacttttgggctgaagctatcctcccaccttggcctcccaaagcactaggattagagacgggagccctggcaccagggcttattatcatttttcccaaatctcccttcttttttccccaattacctaacttctgagtttaattttgatttatataacttcataacgtctaccatttaaataatttttctaattttgctttgaaatattaggttgtagttttcatctgcttcatgaacatgttctggcatgcttgctttgtaggaattctgttctgctacttattctcttttttcttataattttacatgagattcaacctctttctttttttcctttttctttttttaagtgacggggtcttgctatgcccaggctggagtgcaggtgtgcaattatagcacgctgtagccttgaccttccaggctcaaatgatcctcctgcttcagcctcccaatagctggggcaacaggtatgtgctactgcatccagtcacatttgatccttttctgatgctactttataaagtaaaatgaggctgggtagtggcacacacctgtactcccaacactttgggaggctgatgcagaaggatcacttgaggtcaggagtttgagactagcccgggcaacattgcaagaccctgactctactacagaaaaaaaaattatccatatgtggtagtgcatgcttgtagtcccagctactcaggaggctgaggtggaaggttcccttgagcttgggagtttgaagttacagggagctatgatcatgccactgcactctggcctgggtgacagagcaagactgtctctaaaaaacccacaaaactggctagacatggtggctcatgcctgtaatcccaacactttgtgagacccaggcaggtgaatggcttgagccgaggaattcaagaccagcctaggcaacatagtgagaccctgtagaaaaaattagctggggggagtggcacacacctgtagtcccagccacttgggaagttgaggtgggaggatcacttaagccccagaaagtcaagtctgcagtgagccatgatcactccactccactccagcctgggcaacagagcaagactctgtctcaaaaagaaatcccacaaaactttacgttaaaaaatgtttacaatcacctgagtcttcagtgagtcatatgtttttattgatggagggtcttgccttgatattgatggctgctgactgatcagggtggtggttgctgaaggctggggaggctgtggcaatttcttaaaataagataaccgtaaagtttgccatagtaattgactcttcagctcaggaaagatttctctgtagcatgtgatgctatttgatagcattttacgcacagtagaatttctttaaaaattggagtcaatcctctctaaccctcctgctgctttatcaacagagtttatggaatattctgaatcctttgttgtcatttcaacaatgttcacagcatcttccctgggagtagatgccaccttaagaaaccacttaagttgatttatccatagaagcagctccgcatccgtccaagcttcatgagattgctgcaattcaatcctgtcttcaggctccgcttctaattctagctctcttgctatttccaccagatctgcaagtttttttccctcctgaagtcttgaaccccctcagtcatctatgagggttggggtccatttcttccaaactcctcttcatgttgatattttcacctcctcccatgaatcctgaacagccttaatggcatctagaatggtgactcctttccagaaaattttcaatttactttgcccagatccatcagaggaatcactatctgtggcagctatagccttatgaaatgcattacttaaggagaagaaggcttgaaagttgaaattactccttgatccatgggccacagaatggatgttgtgtttgcaggcatggaaacaacattcatctccttgtacatctccatcagagcccatgggtgactagatgcattgtcagtaagcagtgatattttgaaaaaaaatattttttctgagcagtaggtctcaacagttggctgaaaatattcaatgaacagataagctgttgtgcaagttttttttttatagagcacaggcagagtgaacctagcataattctttttttttccccacttcaataataatctgatatagtctagatttagttttttttttttttttttttttttttttttgaggcagagtctcactctgtcgcccaggctggagtgcaatggtgcaatctcggctcactgtaacctccgcctcccaggttcaagcaattctcctgccttagcctcccaagtagctgggattacaggcgcccaccaccgcacctggctaatttttgtatttttagtagagatggggtttcaccatgttggccaggctggttttgaactcctgacctcaggtgatccaaccgcctcagcttctcaaagtgctgggattacaggcgtgagccaccgcacccagctgatttagcataatttttaagggctctaggacttttggaatggtcaatgagcattggctttaacttaaagtcaccagcttcccctaacaacttaaagtcacctgctgcccctaacaagagagtcagcctgtcgcttgaagctttgaagccaggcactgacttctcctctctagctgtgaaagtcctagatggcctcttcttcccacgtaaggctgtgtcgtctccattaaaacacctgttgtttagtgtagccaccttcatcaatgaccttagctggatcttctgaataactttctgcaggttttatgttatgtatatgacatatttccttaaaccccatgaacccacttctgccagcttccaacttttctgcagcttcctcgtctctctcagccttcatagaattgaagatagttggggccttgctctgcattaggctttggcttaagggaatgttatggctggcttgatcttctgtctataccactcagaaactttctccatatcagcaagactgttgtgctttcttatcatttgtgtgttcactggagcagctcttttgatttccttcaagaaattttcctttgccttcacaacttgactgtttggtgcaagaagcctttgtaactgctgtggtttttccccacccacctgcaccttaagcttgtgggtttaacccgtcacctagttttgttgtggatatgatctgtagatctggggtttttaaaatcctacttttgttttcatttggggtgtattattctactaggtctgccataacagacttacacaatggcaacttattttctggaggctggaagtccaacatcaggtgccattagtttggttcctggtgaggcctctcttccagcttatagacagccaccttcttgctgtgttctcacatagactttcctctgtgcaggtgcagagaaaggaagatatctggtgtatgctgtgtcttcttcttatgaggacaccagtcctattggattagggccccacccttatggcctcagttaattgtaatttagacctttaaatctccataaaggtctatcttgtttcatttgtgctgctgtaagaaaaaaacaagaacaaaaacacccaagactatttccctccactggcaatgagaaaaagaaaaagaaaaaaaaacagctaagactagttttttttattaatttatttttatttcaataggtttttggggaacaggtggtgtttggttgcatggataagtcctttttttttttttttttttttgagacagagtctcgctctgttgcctggcgggagtgcagtgcagcgatctccactcactgcaacctctgcctcctaggttcaagcaattctcatgcctcagcctcctgaatagctgggactacaggtgcatgccaccacgcccaactaatttttgtatttttagtagagatggggtttcaccacgttggccaggatggtctcgatctcttgacctcgtgatccacccccctcggcctcccaaagtgctgggattacaggtgtgagcctctgtgcccagccccagataagttctttagtggtgatttctgagattttggtgcacccattacccaagcagtgtacactgtacccaatgtgtagcgttttttgttgttgttgtttcttcctgagacagagtctcgctctgtcgcccaggctggagtacaggggcacaatctcagctcactgcaagctccacctcccaggttcaagccattcttctgcctcagcctcccgagtagctaggatcacaggcatgtgccaccacgaccagctaatttcttttgtatttttagtagagatggggcttcaccatgttagccaggatggcccaatgtgtagtcttttatctctcaccccacttccatccttccccaccacccgccaagttttcaaagtccattgtatcattcttatgcctttgcgtcctcatagcttagctcccacttatgagtgagaatatatgatgtttggttttccatacctgagttacttcagttagaataatagtctccaactctatccaggtttttgcaaatgccattatttcattctttttcatggctgagttatacgtgtgtgtatatatatatgtgtgtgtgtgtgtatatgtgtgtgtgtgtgtgtatatatatatatttcaacatatatataccacattttctttatccacttattgattgatgggcatttgggctggtttcatatttttgttattattgttgttcgtgaccaagcagaagttttgatttttatgtagcttgaattgatccatctttttcgttctttcttttcttttttttttttttttgtttgtttgtttgtttagtagagatgaggtcttgctatgttgcccaggctagtctcaaacccctgagctcaagcaatcccctcaccaatgccaaagtgctgggattacaggcatgagccactgcacatggccctggtgccatatttttgtaatttcaaattgtgctgctatcataatatacaatataaacatgcatgtgcaagcatctttttcatatgacttcttttcctctgggtagatacccagtagtgggattcctggatcaaatggtagatctacttttagttctttaaggaatcttcacactgttttccatagtggttgtactagtttacattcccaccagcagtgtaaaagtgttcccttttcaccacatccacaccgacatcaattattttcttattttaaaaattatggctgttcttgcaggagtaaggtgatattgtcacattgtggttttgatttgcattttcctgataattagtgatgttgagcattttttcctatgtttgttggccatttgtatatcttcttttgaggattatctatacatgtccttagcccactttttgatgggaatatttgtttttttttcttgctaatttgtttgagttccttatagattctggacactagtcctttgccggatgcatagtttgcaaagattttctcccattctgtgggtgagactaagtaatttataaagaatagcaattttttttctcacagttctaaaggttgagtagtccaagattgaggcaccagtaaatctggtgtctggtgtaggcccggtgtatgctttcaagatggtgcctcttgctgtgtcctcacatggtggagcagatggaagggccaggaagctttctgaagcctcttttataagggtgttaatcttatttatgagggtggagccctcttggcctaatcacctcccaaaggccagacctcttcatatcattcctttgttttgggtttttgttttttttttttttttggtttgtttgtttgtttgagacagagtcttgctctgtggcccaggctggagtgcaatggtgccatctcggctctctgcaaactccaccccccaggttcaagccattctcatgcctcagcctcctgagtagctgaaactacaggagcaccaccacgcccagctaatttttgtatttttagtagagacaggatttcaccatattggccaggctggtcttgaactcctgacctcaaaccatccaccaccttggcctcccaaagtgctggattacagatgtgagccaccgcgtctggcccatatcattattttgggggttaaattccaacataaattttggagacacacatatattcaaaaccatagcagtaggccttttctccaaatatagtctctctgggagttaaggcttcaacatatgaattggaggtggggggcacaattgagtccatcacagggggaatatggagaaaggcaaaaactacattctgctatctttcatcttcccagaataagataggctctggagacagcccacacaggtcagctacccaggacgtggagcaaagtggagcaattacggtgctatggttgaatgtttgtcctctccaaaactcatgtttaaatttaatccccaaagtgacagtactgagaggcctttaagaggtgattgggtcatgaggtctccgcccattaatggattaatggatgaatggactaatgagttatcatggatgtgggatggtggctttataagaagaaaagagatctgagccagcacactcagcctctttgctgtgtgatgccctgcaccacctcaagactgaagggagtctctgctagcaaaaaggccctcaccaaatgcagcccctcaccttggacttctcagcctccataaccgtaaaaaataaatttcttttctttacgaattatccagtttcaggtattatgctacgagcaacagaaatggagtaggacatgagaagagatcagggggataaaggaagacgtccagagcattagaaagccccccgtggctgggtcctgccaacctctgcctctcttctcctcatgcctactccctccccctgcatgttccagtgacagaaaactgcttctcattttccctgcacataccaccctgctcctggcctcctgccttggctcacacagtcttcaaggcctgtaatgcccttcctccctcccctacccacttctctccatttcaactaagagcttgtccttattttacccttttgcacttataccttaggcatctccttctctagaaagtctttctagatgtccagatggctgcagggacttgcctgcatgcacatgtatatatatgcattcatgtgcacacacacactcccatgccacccacctatgcctcctcattgcacttgccttattgcattgtaattgttgctttatgaatccccccactagactgtaagctctctgagtacaagcaaagcttgtgcctcatcacttggagcagactggatcattgctctcaatttttcactcccttcctgacttatcatcattaattatccagctatgccatatcatggcttcacagtgggcagaatacacatctctgcctcagtgactttagatttgggtatgggatttgctttggccaatgatataagcagaagtcttcattgtgccagtgtggtttggcccatctcctgtattcatactcctgtgatctctcttgagaagaacatatcccagggtagccactgggccaagtagagtgtggagatatgagtagacttgaactcaacctaaagcctggtcctagcgccagccaactcctggtctgcaacagaagcctgcagacccactgacctgtgaatgaggaaaataaatatttggtgttgtaaaccaccaagatttggaggatgtttgttacatggcatcatggcagcaatagctgactaagacatcattcatccttgtgttcccaagcagagtcctggcccaaaagatattcactgaaataaagaagcaaatatgttcattaatccaaaacatgtagcatgagtgtgctcacaggtcctctgctacctcttcttttcaagcagatagtaatggcttttttcacagagttgatgtgaaagagctcctggcactttgtgctaagtcagtgacattttccttcctctccaccccttgatttctttaaatgagctcctaggctaaagatattagaggcaaaggaagtactctaggctactgaacctctgaaccctctgacctctgtctggggggagcctctttgtgttcttcctctccctcctcctcttttgcccctaggattcctccctgagtcactgcctaactggcttttcctggcctagaaaagaggatttgccctagatcctgatatggctcagcaacttcctgccttaagaggatgggcagcttacatttctccctcttgcaagctagccgatacaagaagtctgtctcctctgaaaccaccatgttgtgaggaaacccaaggtagtcacatagcttgagccatagaggccatattaagaaacaacaaggtgctatacatgtgagtgaagctttcttggactttctagcccagcccagcccagctgaccgaagcagagtgcatgatctcagttaatgccatacagagcaaaggaatcttccagctgaatccagttaatccacaaaattgtgagaaataatacatttctgttgttttaaggcattaagttttgaggtagttatgcaacagataaattaatatatggataaaactttataattatttgttatatatataatattacttattatttctgaaccatctgagaggaaatggcaaaaatcataaccctaaattaaaggagaccatctctcatattgttttctgcctaatttctgcctcaaaggaaagagaaagtaggagttaaagaaaaggcagaagtgaaattcaatagtcagacagcctggcgccacaccccaggcctggtggttaaagatcgacccctgacctaatcacttatgttacctatagattccagacattgtatgagggagcattgtttaactccctgttcagttctgttctgttatgatcactggtgcatgcagccccagtcacatagcccccgcttgcacaatgtatcacgaccctttcacttggaccccttagttagttgtaagcccttaaaagggacaggaatcttgacatcgaggaggtcggatcttgagatgcgagtctaccaatgctcctagttgattaaagcctattccttgctaaaacgggtgtctgagaggtcttgtctaagacaggtcctgctacatttcttggttccctgaccaagaagccaggtgattagtggacggttgaggcagccccttaggcggcttaggcctgccctgtggagcatccctgcgggggactctggcaggctttagtgacgcgaaaagagcgctcccgggtagggaattgcccgggtggaatgcctctccagagcagggcatggtagggccccgcggaggattaacgcagcggatgaacaccggcaaggaatcggcgcttggagtcgcttggtgtccggacatctggaatatggtaagaagcggtcttggaacttgcccactccatttgagtggaagcctggcctgatcacccacaacgtgcttttatcggtaccttggttttggttttgattttgactagattcgcactgttttggtttagatttcagtattgaccttcggatttgaactgttttggctttgatttcggttctgacttggctcaaattgcttaatgaatgagtaactccttatccgtactttggttttagtgtgaattgcttggttagcgggtgactttttgccccctctccccttccctctttgtggtaagagtgttgttttgtctcctgagagaggaaaatgagtaaaacacaaagtaagcctaccccgttaggaactatgttaaagaatttcaagaaaggattcaatggggcctatggaatcgctatgacacctgaaaagcttaaagctttggtgagatagattggccggcattagaggtgggatggccatcagaaggaagcctagacaggtccctagtttcaaaggtatggcacaaagtaactggtaaatcaggacacccagatcagtttccatacatagatacttggttgcagctggttttagacccctcacagtggttaagaggacaggcagcagtagtagtactagtggcaaagggacagacagccaaggaagaaagagtagctccactcccgtcggtcctttcccttggggaagaggaaggagagaggagaacagcagaatacgcggctcacagaggcaaggaaagaccagcagagagaaaaagagagagaggagaaagagagagaggaaagagagagagaatacaagaggcaaagagagaaagaaagacagaggaagagacagagagacaaagaggagtcaaagagagagagaggcagagagaggaagagacagagataaaaagaaagtcaaagagaaaaaaagaaagtcaaagagagaaaaagagagatatacaagtagttaagaaaaaaacagtgtgtcctagtcctttaaaagccaagctaaatttggaacctataattgataattaaaggtcttctccgtgaccatgtaacactccaataccactttgttgtcagcgtaaacaagggcatagcccaaaagcactgaggccactggcaatccgtagcctccctatcaaaatttcttagcccagtaatccacagatggcccatatacattcaatctgcagcggcaacggctttgctaacagaagcaagtagaaaaataacttttagaggaaacctcgttgtgagcacacttcaccagttcagaactatcctaaattaaaaaaaaaaaaaaagcaaaaacgtaacttcctgactcaaaaatcttaaagtatgaggctattctgttagaaaaagatgatttaatattaaccaataaaaattcccttaacccagcaggtttcctaacaagggatttaaatcttaattaccttacaaaggtccgaccagacctaggaggaacccccttcaagactggacgatagatggttcctcccgggaaattaggggaaaaaaaaaaaagagagagaaaaagcgggggggggggagaggggggcaggggggagtttatgtaaaaagaatgttatatggtaaattcttgtcctaaaataaattaactggttgtttaaagaaaaggatgtttgcaataagtcagaaaattgagacatgtcgaagaattgtctgtaaaagtcgtgaaagaagaaaaaaatgtgtgttataaaaaaggaatttacgcaagaaatgttgtataatttaaaagtaattaggcctcctgaatgtaaaactattgaagaaacagtttatatgcaaggtgtatgaggaaagtaaaatatacttttagtaaaaggattataaggaggcataaaaatgtggatttttatctacattaaaaagttaaaaaattgtttttgttttgaaggtttaagcaagttttaaaacgttaattgtaaaagaaattctgtgtataaacatattggctaaagttaaagaggtatcatccagtttttctgtgaactggacattaaagtaaaaacacaacgggtttttcttaaagcactaacctgctctttaacaaaaattataataggttaaaaagagtctataaaaatcttaccttatggtcagacatcaaaaattgaataaatatgtctacaaagttttattaaaactaagtttgacattaataacacactaatataaaggtgaactttagcttatctggtataaaaatcatacaggaagcatcgtcagatataaaatggtatatggctttctttggcctaaaaactaataaatataggtgctaaaggaaatttctcagtaaaaaggcaccaaggactataaaatctgctgctgatgaccccacatttaaaacaaaaggtcaatttcttagaaattatatacttggtttatcttccactttcctttccctcaaaactaaaagtcttttagcacatgtaccacccctagaatttcctgtaaaccagcaccagcctgaagattacgttctcatcaaagggtggaaagaaggaaaactccagccagcctgggaaggaccctactttgtgctgctaaccaccgagactgctgctcgtacagcaaaaaaggatggactcatcacacccgagtcaagaaagcgccacccggtccggagttgtgggccatagtcccaggggaaaaccctaccaaactaaagctaagaaaaatttaactctttcatctattctattactctttcttctttcctagttctattgctgaccatctagttattaacataaccaagtcaatttcgcctcaaactattgcatttaatgcttgccttgttataccctgtggggacttgccaagtctcaaagacagctctctacttcagaaaagtacctctgtccctcctgactgtcctcagactgggcattagtaaattgggatcatttaatccggggagattttgatagaccccagtgtcaacctggagtattgccccctgatgtagagcttttatgccatagttggtccaatgttctgtggatcactaaagagcaaggatgactgccccaactggtttttgtaatttcctaaaaccatacattcattttactagagtatcatagaagttaaagacttaaaacaaactttggcaattaaggcaggataccaagatgcaaatgcctggttggaaaggatcaaatattccgtccgcacgttaaacaaaagcaattgttatgtttgtgcacgtggcaggccagaggcccagattgtcccctttccactaaggtggtcctccagttgaccaggcgtgggctgcatggtagctcttttccaggattccacagcctgaagtaaaggtcatgccaagttctctctctgctatatcccgaagttcagtaccctgagggtcagcccccaagggccatccagcttccgtctcccaacactaagttcactttgtgtctctcacaacagggaggaaacttagttttccttggagacctgaagggatgtagtgagtttaagaactttcaagagcttaccaacaagtcagcccttgttcatctccaagcggatgtgtggtggtattgtggtggacctttactggacactctgccaaataactggagtggcatttttgctttacaccaattggctatccctttcaccctggcatttcatcagccggagggaaggcaggtgatagaaaaaggatggatctggttattggacagaagaatagccatgtcacaactgctaggagccgcagttgtactggctgtgcatgagtccacccacctgggccaagagtcacttaaaaagttgtacttctacatcttacatctgtcagcccttggcaaaacagtggtgccacagtgtgtcacctgccggcagcacaatgctaggcaaggtccaaccatcccgcctggcatacaggcttatggagcagccccctttgaagattcccaggtagacttcaccgagacccccaaatgtggagatctcatccctaggtttggactgcccttgcaaatcggctcggacaacgggttagcatttgtggatgacttggtacagaagacagcaaaggcgattgggtatggatcaaggattggaacgtagcccccttggagccacagtggaaaggaccccagaccgccatcttgaccactcccacagctgtgaaagtagaaggaatcccagcctggatccaccacagccgcctgaaacccgcagcacctgagacctgggaggcgagaccaagcacagacaatccctgcaaagtgactctgaggaagatgacaagccctgctccagttacacctggaagccaactggtccatgcacggccgaagtgtaatgaaactcaccatgggacttactttccttaaattttggacttgtacagtaaggacttcaactgacctccctcaaaccagggactgttcctagtgtatatatcaggtcactgaggtagggcaaaaagttaaaactgtcattttgttctatagttattgtaaatatgttggaaccctaaaagggacttgtttgtataatgccacccagtacaaggtatgtagcccaggaactcaccagcctgatgtgtgttataacccatctgagccccctgtggtcacagtttttgaaataaaattaagaacagtcacctggtggggtctaaaccatactaagaaaaatccatttagtaagtttcctaagttgaaaactgtttgggtccatccagagtctcaccaggactggatggctccagctggactatactggatatgcgggcatagagcctataccaaactacctgaccaatgggcaggtagttgtgttgttagcaccattaagccatcctttttcctactgcccataaaaatgggtgacctcctagccttccctgtctatgcttcccgagaaaagaggagcacagccataggcaattggaaaaatgatgagtggccccctgaaagaatcatacagtactatgggcctgccacatgggcacaagactgctcatagggatgccgaacccccatctatgtgctcaaccagattatacggttacaagctgtcttagaaataatcactaatgggccaggcgtggtggctcccgcctgtaatcccagcactttgggaggccgaggcaggtggatcatgaggtcaggagatcgagactatcctggctaacacagtgaaaccccatctctactaaaaatacaaaaaagcaattagccaggtgtggtggcagacacctgtagtcccagctacttgggaggctgaggcaggagaatggtgtgaacctgggaggcggagcttgcagtgagccaagatcgtgccactgcactccagcctgggtgacagagtgagactccatctcaaaaaaaaaaaaaagaaataatcactaatgaaactggcagagctttgaccgttttagccaggcaagaaaccctgatgagaaatgccatttatcagaatagactagccctaggttacttgctagcagctgaaagaggagtttgtgggaaatttaacctaaccaattgctgcctgcacataaagggcaagtagttaaaaatatagttaaagatataacaaagctggcacttgtgcccgtgcaagtgtggcatgggtttgatcctgggaccatgtttagaaaatggtttccagtgctaagaggatttaaaactcttataatagaaattataataggaacctgcctgttgcttccctgtgtgctgcccttgctccttcaagtaataaaaagttttgttacaacttagtccatcaaaatacttcagcacaagtgtactacatgaattgctattgatctgtcttacaagaaaacctagatagtgaagatgaagatgagaactcccactaataagtgaggttctcaaaggggggactaagggaggagaccacgtctcatattgtcttctgcctaatttctgcctcaaaggaaagagaaagtaggagttaaagaaaaggcagaagtgaaattcaatagtcagacagcccatcaccacaccccaggcctagtagttaaagattgacccctgacctaatcgcttatgttacctatagattccagacattgcatgagggagcattgtgtaactccctgttcggttcagttctgttctgatcaccggtgcatgcagccccagtcacgtagcccccgcttgcacaatgtatcatgaccctttcacttggacaccttagttagttgtaagctcttaaaagggacaggaatcttgacttcggggagctcagatcttgagacacgagtctaccaatgctcccagctgattaaagcctattccttcctaaaactggtgtccgagaggtcttgtctaagaccggtcctgctacaaaatctttaatgaacaaaacttctgtttataaaaccacagtacagctatcactcaggaaagttaacattgagacaatattatctattttgtccctattcatattttaccaattatctaaatagtgtctttcacagtaatcctttttttcagtttcaggatctagttcaggatgcatttagttgttgtattagttaaatttagctgcacaacaaacttggtagctcaaaacaatatttgtcatctccgtttccatgggtcaggaatctagacatggcttagctgggctcttgagctcagggtctctcacaagactgcaaccaaggtgtcggccacagtcatctcagaattcaagtgcaatacgatctgcttccaagctcattcagtgattgttggcaggattcaggtcactgcagactgttggatttagggcttcagttcctggctggctgttggctaggaattcctcagttccttgaaacatgggcctctccagagggcagctcacaatttggcagcttgcttcaccagaacaagcaagctgagaagagccagaaagagaattctagcaagatggaagtctcagtcctttgtaacctaatctcagaagtgatatctcatcactgacatctgcctatcacatgtttatgtctctagtctcttctgatctggaacagtttcttagcctttttattgtctttcatgtccttggcattttaaatattgcaggctagttgttttgtaaacatcctttgttttgtaaacagtttgagtctgtttgatgtttcctcataattccattcaagcaatgcatttttttcaggaatacctcacattcaatgttgtattcttagtgcatcgcatcaggaggtttgtccccttattagtgatagtaacttggattgcttgtttaaaatagtgctcaagctctttctttttatttttttttttttttgagacagggtctcactctgtcacccaggttggagtgcaatggtgtgatcttggctcacttcaacctaggactcctgagctcaagtggtcctccacctcagcctcccgagtagccgggaccacaggcatgcaccaccacacctggctattttgtaaatttttttgtagagatggggtcttgagatgttgtccaggtcccaaactcctgtgctcaagagattctcctgcctcagcctcccaaagtgctcagattacaggtatgagccatcatccccaggggccactcaagctcccatattcttaaccactatgcaattctgcctctggccaggaaagttctttccatttttcaaacagggtagaaaatgagactaattctcttggttgagaaactgtgggaagaaattgagcctggaaactattttaggacaaaaattccctatgtcctggatcagaccctctagctctcatttgcactcaagataccatcactggaggcccaagcattagctgtcatgccagtccacagcttggagaacgaatgtcctttcacacctgttttttctttttgttactggttccttcatctggaaagcccttggaggggccagtggtgcaatggataacacatctgactacagatcagaagattctagaaaagcccttgtcccacctctacctgttctctgcctctagaactcctgttcatctctcaagcccaggccagggttcagctccagaaataaggctgcagcattgtacaattccaggggtgcctggcaccccctggagttgtgctagcctgtggttctgctctggaaacccctccccagcctcacctcatgtgcacattttctcattagtatttgttaagacgtatgtgtgtcttctctagacagagtaggactaaggcttgtttcccctgtggacccggcatccagtatgtgctcaacaaggggtgggttaacacgggaatttttcatcccaccaccactctgccccaaaacagcagcacagtccttttctccttaatttgatggtgacacagttctggcatttgacctttgtatccctgaggtgcatcacaaagttcccgcaataaaatacaacactccaaatgtcccagtggaaagcccccttataaggccagcaggtgcagttagaatgtggcttcttgacaaacttgtgaggctgaaccatggccctcccatctgagacagaagagcgctgaaaagctgttggagagcaggcagactgattccaaggcagaggccaccggtagggtggggtggggtgagggcagccagggctgctgaagatgcagacagggacttggaggtgagctgggctctgaattctcagcaaacctctggttccctagggcaggtcacagaactattagtaataggaccaaggcccccaaacaggtttttctgctaaaagagactctttggtctcacaggaggatctggagtgcttcatccgggtccctcccccagcagtcttggtggaagctttagctggcctggacccagatgatgaactgggacttttgactcccaccgactgagaggctggctcctgggaaacgtgggtctaaggttagctgagagaaaggatgaaagagagacccaaggtcaggcaagtaagtttattaacctgccaggctgctccaccacagtcagaggaggaagccctgagcttacaaaatgaggggtttatatgagggagagagaccctggggttgttggtcgattaactttaccacatatcatcttgtgaccagcttacaatataggaatttacaagagggtgtaacttaggtttatccacatttctcatgaccttccccatgctgcctgttgggctgtaagcaagtctggtgaccttgctgtagcacctagataagggtccaggaatgcagcttcagagtattcagggtaagggtcagctgcattgtgtgtggggggtcctggggcagcttgtccctaacattccagccttttaataggtaatagaagaggggtgccattgttatctggctgcttcttgctggataggggcgacggttatggggagagtctgggtggtggggactgccattcctggagttgtcggtattcttggagcagcatcatatcctgtattgttccgtgggtgaaggctctaatacggtcctgtaaaaactgggtaaggaaacataagagacaagggccaaatgctaaaaggaggaagagggttatggcagggcctaggaagggcagtagccattgtgcccaggagttacgaaaccactggggccaggagtctgaaaggtgctgcctgatttcaaaagctttttcatttattcatcaggtggcatctcacactagtcctgaccagttagtatagaaacagcactcatctcctaaaaagatgcacagtccacctttcttggcagtgaggagatctaaacctcaacagttttgaagtgtcactgctgctaaagagtctatttgggattggagagcaaggatggattcagttatatcttgtaggctgtctgagagatcttttgagagagcgtgatagtaggacagggaagtggacaagcctgctatccttgttcctgttgcagtggtaattcctagtcctataagcaggagtattaactgtacggctccacgctgacagacttgagccttaacagggactggtaaactctgatttccaggggcaatgtcaattttggggcttaagaagaccagggtgcaggtgctggtccaattggcagagaagcagacataggttgaggttctgcacaagaaaaatatgccttggctgggcagacagaactggttatgtttattgaaaaggtgcgagagtatattgttttcattttcccacatgcctggagtccttactaaggcagctccagtgagtgactgaaaaggagttgcagggatagtttgagtggctccttgtgttttattttcccattggagaaagaatcgttttgtgtctattaggagccattcagaggagtaattgaaagagggtataaggaggcattcggcagggagggaagccatgctgcaaggggtccatgggtgaatggttatacagttcgtatatctgccattacaaaatcctgaatgtttatttagtaaagagctggtaatgacctttgggggtcctgaaaaactgacaagccgtttaaattcggctgtttgggtgaccttaaaattttggtggtcgtttgggacttgaagctgtaaggtatagttacattgatgggatggtaggtgacctaaagtcagacctgaggacaggttgtgttggatacatattagggcttgaaaagttagactggtgtcggtggtcacagggccatgaatgggcttgttattacttgtctgttgggtaagactggagatacaggagcgtaacaattgtactgtgttccctgtcagagtgctttttgtcatatctgtgatagaaaactcggccaatagctgcatgtctaaaagttgaaaggggctttttccttcataacgggtgtgataggttaattaagaacccagttttttgagtgaacgggggtggcaacataggtggtagttgataggactgtgggcagagcccacagtcttttgctaggatggggttggactggtttagcagggagtgagttaggttaagggtcttatagaggtagtcgggtactattgtaaggggagatgtggctacgtggggcagccaagggagtaggagaggtagacaggcaaagagtgagtaggaaagtaaataagtgcatttcatctgaggaaaagtcacatagggtgccttggaagagaacgtcatctatccactctacaagagagtcaagattgggagtttggggatgaaaccaagagatgtcttggcaaacggagatgaggaagagggtgaaacagcaaggtaggcaagaacagggcatttaagaaatcaggagtgtacttatgattgtcaggaagggaaggaggagtctgggtattgttcaatggtcttcttcaggacaggtgtgaggcggggtttggttgggccaaggagagtactggagaatcgacagaggatggcagttggtgggtcggtgggtgcttcgggggctctttttaatctggaaagatggtaccaagagatatgtcctgagagtttagctgcagtgggggtatgagaagaacttgaaaagggccttcccactttggtttaagggttgttgggttaagagtttttagcaagacatgctgtcctggaaggagattccggttggggggccttcgtggggttttgggagggcctggtcagcttgttggtggaggagatggtggatgagggagagtgttgggaggtattctcctagctgagagttagaagggggcctgttttgtaagaggaaaggctgtccatacattaactcaaatggactgaggaacaagggtgcttttggactggctctgatgcaggccagtgctatgggcaaaagggaggtccatgggttttggacttcaagaatgagtttggtcaactaagctttaaggatcccatttgccctcttgacttttccagatgactggggccagtatgggatatgaagtcaccactggatgctgagggactgagaaacctgttgggtgatttgggagatgaagctagggctactgtctgattgtatggagtgagggagaccaaatctagggatgatttctgttataagaatttgggggacatctgcggccttttctggaaaggtaggaaatgcttctacccacccagagaaggtatctataagagtaagaagaaattttgtcctcttgacgggaggcatgtgggtgaagtctacttgccagtcctgccctgggagtgttcctctgagctgatgtgtaggaatagggggagagcggagggccccttgggaggaagtaacacagcatatatgacagtttaaggttatgtcttttagtgacgtgaatagaaggggagaggagaaataagggcgatggagtaggtacaggggtgctcaccaatatggaaggattggtgaagagatgtcagaatttctttggtttgctcttgggggaggatgagcttttgatttttgactatccagtcccttgaaaggaggctccttgctgtagtagcgaagctttctcagtgagagagtacttgggttggattgctgagataatgaggaggagagggggaggggcagaagaaagggaggattcttttgctgcctcattggcctttctgttccctcttgagatttcatctgatcctgtttgatgtcctcgacagtgtataactcctgctttcgctgggaggtgtgcaacctgaaggagttggtaaataagggggctgttagtgatgggggttcctttggcagtaaggaatcctctctcttgccagatggaggtgtgggaatgacgaatgtgataggcatatttggagtctgtataaatgttgactcatttgcctttggaaagggttagagccctggtgagagctatgagttctgccttttgggaggaggttcctgggggtaggggcttggcttcaattacttgtcaagggaaacaaatgtatatccagcaattttgggggagctggtgggcccagaagaggagccatctatgaatagttgttcatcaaggctggtgagagactcggaggaaatgtttgggaaatgtagctgtacatggtccagaatgtcagtgcaagaatgagtaggaggggaagagaatacagggagtaaggatgctgggttcaggggagcacttttggcaagactggattcgggattttcgataaagagggcatggagtaattgaatccaggaaggaggaagggagcttagtgctcgggaggagaggcgatcttgtagattatgaggactgtggatggtggtattctggctgaaagttagtttcctgctttctagagctaaaacggtaactgctgctagtgctttaaggcaggttggccaccctttgactgtgttatctagttgtttagagaggtaagctacaggggcaaaggaaggatttcctttctgttgtgctaagacaccgagggctattccttggctttcggcagtatagagagtgaaaggttgggagatatcaggtaaggacagagctgatgcagtgacaagagcagtttggagtttgcgaaagctggggtgtatgttatgtgtggggtttaggggttcattgagagggcctttggccacttcatagaggacatcaactaggaggacaaagttggaaatccatattctgaagaagcctgctagccctaggaaggaaaggatttcgcttttggaggaggatgggggtagattatctattaatgctgccccagctggagtcataacccaggccccaggggaaagttgaattcctaagtaggtcaccatggaggtggagagttagttgggccttggagggggagaccctataccttttgatagtgagaaagtttaagagagtggccgtgtgaatttgagagtctcttagagagaggctgcaaagaagaaggtcttccacgtattaaacaagaagactgggagacaggtttaaggaggtgaggcctcagactagagcttgtcggaagaaatgagggctatccctgaagccctgaggaaggacagtccatgtgagttgttgtaactggagggtgtcagggtcagtccaggtgaaatcaaataggtttggggcatcagggtgtaggggaatggtaaagaaggcatccttcaggtcaattgtggtgtagtgggtggtgttggtggggacaagagagagaagtgtataggggctagggactatgggatggatagggaggacagcctgattgatggctcagaggtcctgaacgagttggtatgagccatcagattttttttttcttttgagacaaagtcttgctctgtcacccaggctggagtgcagtgatgtgatcttggctcactgcaacctccacctccccggttaaagcaattctcctgcctcagcctcctgagtagctgggattacaggtgcatgccaccatgcctggctaatttttttctatttttagtagagacggggtttcaccatgttggccagactggtctcgaactcctgtcctcaggcaatccacctgccttggcctcccaaagtgctgggattacaggcgtgagccactgcgcctggcccagagccatcatattttttaacagggaggatgggggtgttatatggagagtgtgtcggtctaagaagagtgcataagcagagcttgtttatgatgggttgtaggcctttttggtgagttaggcagattgggtattggcgaacattgagaaatttggaggggtcttttaactggattttgatggggtcatggtgagcagctatggaagggatggtggtgtcccacactactgggttaaagagagaggcgggaagtggtactggggagagggatcagaggctggactagtggagaggagcaggagggactctgcttgaggggagcaggaaaaggtgatagaagctttgaatttggctaaaaggtcttggcctagaatgggggtggggcaacgaggcatgataaggaaagagtgtgagaaaacggtatcaaacagggaacaagtaggaggtctgctggtgcatggacgtcagatgagtccatcaacccccacaactaagacttgatgttggtagagttgctgaggcaggactggcttgtctgtcataatataaaagagtattggaagatgtccggggtccgggtctaaaaccccttgtggcctttggaacaccaagctctgtgccaaagggtggaaggctgccctgccgcaccacaaatttaagcccagggcataaaactcctcatgacttggatggaatccagggctcagggcatacaacccctcgtagcctctggaatgtgcacagacttgttggttgctctcccaggctcataaacatgttctccattatctcaagcagcagagcatattcatatgtgtcaaagaaaatgctaaagtgtcacagctacgcttgatgcaccgctacctttctacccccatatccgcatgtcctcaccacctgcttctttgtttgatcaccaataaatagtgtgggttcccagagctcgggtgcttcacagcctccataccagcattggccccctggacccaccttatgcactcttaacttgtcttttctcattcatttgactctgccagacttcgtagcccccatggcctagtgttgggtctgatcaccctaacatttctggcgcccaacatggggctatgaagaccctggtgaaggaacactagagcatgtggaagcagaggacacattgtcagaggacacccgaggatgactgaaagaagctcggcaggtaagctgggcactcgtaagaaccagggtaacaatgggacagaatgaaagtaaacattctgcttatttacatttcttttttttgtgtgtgggtggcaagccacccaggcgccaaggcaagagactgaaggcacaagcttgttacagtataataaagaaaatacttaaaataagaatagttatattagacgtagaatatagacacgattatatatgaatattatcaatcattagtttgtagcattactctttattccaatattataataatctctgttttacaattataacctaggaaaaaccaggccatacagagataggagctgaagggacatggtgagaagtgaccagaagacaagaatgcgagccctctgtcacgcccagacagggccactagagggctccttggtctagcggtagtaccagtgcctgggaaggcacccgttacttagcagacggggaaagggagtctccccttccctgggggagttagagaagactctgctccaccacctcttgtgaaaggcctgacatcagttaagcccacccacagccatccagaggcctaaacgtctccctgtgatgctgtgcttcagcggtcacgctccttgtccactttcatgttcagccctgtacacctggctctgccttctagatagcagtagcagaattagtgagaatattaaagtctttgatctctccaagaaattcatagaagaaataatggcataagctgtcccctctctctctctctgcctcagctgccaaacagggaagggctccctgtctggtggacatgtgactcacatgaccttacctatcattggaaatgactcacattccttaccctgcccccttgccttgtatacaataaataacagcacagccaggcattcggggccactaccggtctccacattttggtggtagtggtcacccgggcccagctgtcttttcttctatctctttgtcttgtgtctttatttctatgatctctcgtctccgcacacaaggagaaaaacctacaggccctgtagggctgatccctacattttttgagacagagccttgctctgtcacccaggctgcagtactgtggcacgatctcggctcagtgcaatctctgcctcccgagttcacgccattctcccacctcagcctcccgagtagctgggactacaggcatgtgccaccatgcccagctaattttttgtatttttaatagagacagggtttcaccgtgttagccaggaatgtctcgatctcctgaccttgtgatatgcctgccttggcctcccaaagtgctgggattacaggcgtgagccaccactcccggccttagttatttaaatttcttaaggcatttattatggaaagggggagtgaaagttagtactcagaatttattaacactctttagtacagtagagcagtttgcccatggttcccagaacaagggacaatggggttggatgaatgggaaagaattggcagagattttaaaaaggtgcataaagaaggagccaaaattccagtttctgtttggtcagtgtgagcattgataaaggcagctcttgagccatttcaaacaatgacaagacagattcagatgaggaagaggcagacaagtgtaaaaaattaacttcagattctgaatgtgaggaacaggaaccagaggaaattaaataaaagagagggaaactgaaaaaggtacatttcactagcctgtcggttccacctgctgaattaagtgaatggccacctcctccctctccccttaatggacaagaacatgaactagctaaaaaactaaaaaactgctcctgtagttgcaacattaaaacctggagctattggtggcgctatacaaaattctattcaaaaggctagagccgagggagaccttgaagtatggcaatttccagttactataacccagcaaggagggcagaatatagctaattgggccacttttccttttaagttgttaaaggaattcaagcggaagccattagtcaatatgggccaaattctccttttgtacaaactttactaaaaaatgtggctcttgataatagattaataccatatgactgggatactttaacaaaacctgttctcactccgtcccagtacatgcagtttaaaacttggtgggccgatgaagctcaaactcaagcaagagaaaacacacaagcacagccgcctgtgcctgtttcctttgaacagttaatggggttgggccctaattggggccgactagacaatcaagcagtaatgaaaaacgttgccattgttcagttacacactgtgtgtttatgggcatggaaaaaaaataaatgttatggggaaaaaatatccttctttcagttctgtctgacaaggacctaaagaatcatatactgactttattgctcggctccaagaggctgtgcgtaaagccataactgatgaaatagctcaagatgtggtaatacaactccttgcatatgataatgccaatacagagtgtcaaaatgctattagacctatgagagggaaggctcatttggctgaatatattaaggcttctgatggcattggaggtaacttaaataaggctactcttttagcccaagctatggctggactaaaggtgggaaaaaatatgccccgtttctcaggctcttgttttaattgtgggcaatttggacacacaaaaaaggaatgtagaaaagaaaatcaaaaggcaaaaactattaccatcaatcaacagaaaagtcctggcgtatgcccctgatgtaagaagggcaatcactgggcaaatcggtgtcattctaaatttagcaaagatgggcaacctttttttgggaaacgggaagaggggcccacctcgggcccctcaacaaaccaaggtatatctggcacattcagtgcccttacaaatgtacaacagttgtcccctgccacagcaggcagtgttgctgtagatctttgcagcacagttcccatttccctacttcctggggagccaccaaagaaggtccccatgggagtcaggggccctttaccctcagaacagttggtctattgctaggaaggtctagtttaaattttagaggtgtcactatgcatgtaggaataattgattctgattataccagagagattcaattagttgctagttcctcaattccatggtctgcttcctcaggagaaagaatcgctcagttgttactgttaccttatgcaaaactgggacgcagcatagtaaaaagaatgggaggctttggtagtatgaatccagcaggaaaagctgtatattgggttaatcaagtgtctgataagagacctatttgtacagtaaccattcaaggaaagaactttgaagggctagtagataactggagctgatgtttctatattggtttgaatcaatggccccagcattggcctaagcaaaaggcatccattggtattgttggagtaggggctgcctcagaagtttttcaaagttctttaattttgccatgccaagggccagatggccaagaagggacaattcaacctattacacctattcctgtcgatctatggggtagagacttattacaacaatggggtgctgaaatacctattcctattgatcagtatagtattaacggtaaacaaatgatgagaaaaatgggatatctcccagggaagggactaggaaaaaatgaaaatggccaaccagaacatttagaactaaaaggacaaacagatcaaactggattagggtatcatttttaggaacggccattgctgagcctccggctcccattcctcttgtttggttaactgctaaaccagtttgggtggagcaatggccactgaaacaggaaaaactggaggctttaaaataattggtacagaaacaattacaaaagggacacacagagcctactctctctccttggaattctcctgtgtttgttattaagaaaaaatcccagaaatggagaatgttaacagatttgagggccgttaatgctgtcattctacccatgggtgcactgcaaccagagctgccctccccaactatgattcctaaatcctggcctctaatagtgataaatttaaaagattgcttctttaccattcctttagctacccaagattaggaaaaatttgcttttactgttcccgctataaataacaaagaaccagcagacaaataccattggaaagtattactatttgtcaaacttatgtcagaaaaggtattaagccagctagagaacaattcaataaatgttatattatccattacatggatgatattttatgtgcagctgaaactagggaggaaaaggctgtaacagcagcaaggttaatcatagcccctgataaaatccaaacttctactccctttcagtatttaggaatgaaagtagaacaaagtactattaagcctcaaaacattcaaattagaagagataatttaaaacctctaatgattttcaaaaattattaggagacattaattggattcatcccactttaggcagtcctacttatgttatgtctcacctcttttctaccttacgaggtgattctaacttaaacagtaaacactccctgtccaaggaggcattagagaaacttcaattaattgaagaaaaatttccacaggcacaagtgactcgagttgacccattgcagtcattacagtttttagtttttcctactaaacattcacgtacaggaattattgttcaacagaatgatctggttgagcggctttttgtacctcacaatacaaccaaaacgcttactctgtacttagatcaagttgctgtattaatgtagtgtgcaaggctgtgcacaacaaagttaatgggatatgatccaaatcaaattatacttccattaaacaaacaacaaattcagcaagcttatattaattcccaggaatggcaaattaatttggcaggttttattggcattcttggtaatcattatcctaaatccaaaatattccaatttcttaaattaatatcatggatattgccttccattactcaaaaagcccctattgaaggggccattactgtttttactgatggatctagtaatggaaaggcctcatttgtgggacctcaacaacaagtttttcaaactgactttgcttctgctcaaaatgctgaacttatggctgtgataacagtgttaaaaacttttaaacagccaataaacactgtttctgattcagcctatgtagtgcaagccacacaaaatattgaatgtgccttaattcaaaatgtgactaatgaccaacttaatcttttatttcattctttacagcaagcagtacaacaaaggcattcccctttctatgtcactcatatgagagtgacatagccctttaaatttaatcaaagggtggataattatatggggaataggatttgcttgtgtctctcaggtaacaatcaggtgcctgtatgagtgcccaccaaacatctgaaaatctatcatgagctacagcaggaagagaggactctgggaagagtcctctgaagagtccagagacgtggtttcacggtgttagccaggatggtctcgatttcctgacctcgtgatccgcccacctcgacctcccaaagttttgggattacaggtgtgagccatagcgcctggccattacccggcagctttgttaaggcctgcaatgaggcaagtaatcatatagttacagacgcccagctggggtctgtgggttggtactcccaggaaggctcttcctggggaacagcagtggctcctatgggcttagcaggatcttgcccatgaagatcgtcagtgtgtgcctgtgctacaagccacactctttccttctcttctggaaggagagtatagaagagaggataatgtagagatcatgccaagtgagttcataagattgggtaagatatttaaattctttgatataagtatcaggatcggaggagaaggacctgagacgtttttcaatctgtgagagattggagagggagaaagggaaatggacacggatgatccccttgctcctgctacttcccagagaggaagcaagggaactggttgctgagtatgttgggcccaagagcgggtgaggggtggagatggagaggactcagagtcagaagcggggtggttggagagagggggacagatgggtagagccagagcagggacataccgtgaagaatcatgatgctctggtggaggatcaagatgctgtcagggaggggcaaaattggcggggtcaaagaaagaggagttgtcggctggggctgttgcgggggtggtgggagacgggggtggtgggagacaagtctggtgagtaggatttggaaagtggagcagtactggcagagggaagggcggttacggagagtgaagaaagcctgaacataaggaatctcagaccatttcccactgcgatggcaaaagtcgtctaagtctctaagtatattgaaatcaaaagtgccattttcaggccattgggagccattgtccaattggtattgaggccaagtggtattgcagtaaaagataagtctcttagaacggacctctgaatggaggctgagagccttgagattgcagaggagacagccaaggcgggtggtcttgggatgggtagactgagaggctcccatagtgaatggagggtggggggtagaggaagaagagactgcagatgacaaggatggcgagagagggtgtcccctgtcctgcaggccttgtctggaatagaggcagccaccgagtcaggtgtccttcaggtctcctctattctggacaaggcccttgggtgaggggtgataggagagagagaggggaggggggagagggagagagagagagacacctctaaggacacgcagccagagcctgtccccttcctgggtttcggcaccaaaatgtaacgttagctgagagaaaggacaagagagagacccaaagttaggcgagtaagtttatcctgccgggctgctccaccacagtcagaggaggcagccctggagcttataaaatgaggggttcatatgggggagagagaccctggggttgtcggttaactttaccacatatcatctcgtgaccgcttacaatataggaatttagaagagggtgtaacttaagtttatccacatttctcgtgaccttccccatgctgcctgttgggctgtaagcaagtctggtgaccttgctgtagcacctagataagggtccaggaatgcagcttcggagtattcagggtaagggtcagctgcattgtgtgtggggcggggggttcctggggcaacttgtccctaacagggtcaggattagttctatctggttctctatttgctgtccatctgtaaatgctgagaatggcagagggaggccaagtgtagataatcaggttttagcttttttggattttcctacttctcctgtacaggaaataacttattgtctaaaccccatactatcccattaaatgtcaggagtgctgtcttaggcctgaattagctcatgacgttacgtactggaagtcccaggaggaatgcccagcaagtggaatccaagacgttctcgccttctcggggacagggccatcaccaggattcggaaaggaacagggaggttcggtttgtgttccagttctgagccctttacctcatccctcgagaagctggcctttgcaccccgcagccggtgctgcccagccgaccacgccatgcacgggaggcgactgggaccccacttgcctggcagcccggccggagacccagctgcctgggagggtccgaagataatgccaggcagccctggcgggccgggaagaccctctgtccctcccgtttcccagttcttgaattaggggagccttggactggctggcggcgcaggaaagtgcaggagggcggatgtgggacctgctgccgcccagggagacggtgctctgttctttggaaccagggaaaccgtcctccagcccacttgccccaggggggagcaggaagatcctctccgggcagagatgatggggaacccgtgcagccagagggtctccctggcaaaggtcgggggagggggcggccgtaacggccccgggcgctccggcacggagaagccaagggggttctccaagcagcctccacccaccagcctcgccaggagagcgtggatacccgagcggccccaagcgagtccccggggactggagggccgaggggcagcgcccggaacaaaggcccgcagaggggtcctggagacagcggctccccgggggcggctcccctctctcccctctctcccctcctctcctctcccgccagctcctccttctcctccccttcctcccccagaggcccggccggctcgcggcccgagcagcgccaacttcgccaacggttcccaagttgccgggcgcgcaggggtgggagctgggtggggtgaggaagaggaggaggaggaggagaagggctcccggacgccttggacgcggttcaggaatccgccgccgctagccggctcgggcctgagcggggagggcgccaggcaggacctctcgcaggctcgctgcgcaggacggcgcccgcctggcgccgcttcccttccagcgtgccgaccggccccgcagcgcctccatccctccggcccgccccggagaagacgcacagctcgggccgcgcgggcgccggggccgcggaaccgcttctgccgggatcttccaggaggaaagcgaagttgcgagcggatgctgcccgcgccggaccccagccgcggagggtcggggccgccggtggagtctcggcggccggggtaagtggggcgccggcgtcctggaaccgccgcccagcccgggggaggccgcccagccgggagcccccgccttccgcgtccaggcgcgcgcgccagactttggagggagaagggggcgaagcggacggtgggaggtggagttcccagctcggggaaaagcccaggcaggcacccacaacccgctgcaaccggatcacacctgccaggtacacacagctcatcgccactcataccccgcacacggcgcaggctgatctgcgcacacccacaccggccaggcacatgccacacaccgaaatgcacattcctgggagcgcgggggatttggcctctacagcaggcacgtcctcacacccctccgtcacatccacggcctttgtctgctgcccccgcagcccccaaggagagggagcccccaaagcgcagcgggcaggagagaggctgcctgggttttgaaaacttgtggccagaaccccgagaccaaggggagcagatgttgcagtcggttctcggagttctgcaggagcgaatttggtgtggaaactcggtgtctgggtgatgtgtgagtgtgcgaagcccttccggaggcgaggcccggagagaggagggagtgattcataaactcagagccggcgtgccagggtctgtgagcagcgtggaagaggctggcaggccgttgctgcgctagacagaagggtagtggccgtgacagtcttccagggaagcagggacccttccccccagcggatgtgcttcctccagggacttccaagggaaccgggtgagcagattccagtcctgggtgtggacggggtaaggggaggtggggggatttaagcctaaaaggttagggagaaaccaaggcaggcctgacgccttcattattttccttgcacctgaagttgtgtttggtttctgatgcgtggtgttgctgggccccaggatgtacgggggattgtcctgggcctagcatagtgcctggcacagtgggcactcagtcagtacttgcttgatgaataatgacaccggtaattatcattcattatggactcactgtgcggcaaggccagtgggcctctgctgggttgaaattgattttccagcagagaagggggcctgagtagctcctaggagccctgcctgatctgcttgggccagtggcccaggcactgtgtgttccactgtgtcccgtgggctggccttgggagactggagctcatcattggcctctgcccctctaagagggcagcaggaaaagcttcatttctgtatctggctaagatggggttgatgtgggttttggtagatggcaggctgtttggcagattctgtggggtctcaattgaagaataactttagatctgcagcagagagaggggttggttccatcaaccctcccatctcctggctgctggagaagaggggtgggtaagtggagaaagagatgggccgtgctgctgggcatgtgctgggggtaggaggaacatgggaacatgtagaatttgggggcagccgtttttcttcctggctcctgatggcctggctggagatgggtctcatgaagggtctaggagctgtgttctgcagcagtggcttggctctgtggtggcagcaggtagagcagtggtcacagtccctgtactgagtattgctgtgggttctcctgtgccagcttgcatgagtttcccagaggagcagaaacattcgtgttcctggaactggattgccagtagtcttgggattgagagtgcacaaagatgtgggggtggcctgggcatgtcatccaaaagaaatgtgtcattccccacccctgcccccttgtgaagagctctgactaggttcagtgtgcatttcaaacttctaaatgctgaaattagcaaggcatgtgggcggcaccaaggactggcctcagatgaaagaggaggtgatctgggcttgggcacccccaatttcaggtggaaccctgcagccagttccttccctatatcacctttccaccttcattatgccctctgtgaatcgagagttctgtatacattttctaattaaatcattatatccctatgaggttagcatttcatctccattttgcagattaggaaactgaggaccagaaaagttaagtaactttttcaatgtcacacaggtagtgagagacaaagccagtgtttgtgtatttggtttttttaaactttatgttaggttcagaggtacgtatacaggtttgttacataggtaaattgtatgccatgggggtttggtgtacagattatttcatcatccaggtagtaagcatagtacccaataggtagttgttgggtttgtttgagacagggtctctattgctcaggcaggagtgcagtggcacgatcactgccactcaccatagcctcgacctcctggactcaggtgatcctcctgccccagcctcccgagtagctggcaccaccatgcctgactaatttttttgtattttttgtagagacagggttttaccatgttgcccaggctggtctcaaactctggagctctagcgatctgcctgcctccacctcccaaagtgctgggattacaggtctgacacactgcacaggcccgagatgggtggtttttgatcctcaccctccccactgtctccaccctcaagtaggtcctggtgtctgttgttcccttctttgcgttcagatgtacccaatgtttagctcccacttctaagtgagagcatggggcacttgattttctgttcctgtgttagtttgcttaggataatagccgctaactccatccatgttgctgcaaaggacatgatctcattctcttttatggctacatagtatttcatggtatatatgtaccacatttctttatctggtctaccgttgatgggcatttaggttgatttcatgtttttgctattgtgactagtgctatgataaacatacgtgtgcatgtatctttatggtagaacaatttatattattttgggtatgtacccaataatgggattgcttggtagaatggtaatcctactttgagttctttgagaactctccaaactgctttccacaatggctgaactaatttacatacccatcagcagtgtataagcactctgttttttgttttttgtttttggtgggagtggtgggatggagtcttgctctgtcaccaggctggagtacagtggtgcgatcttggctcactgcaacttccacctcccaggttcaagcaattcccctgcctcagccccctgataggcgtgcaccaccatgcgtggctaatttttttttttttttgtattttagtagagacgaggtttcaccatgttggccagaatggtctcgatctcctgacctcgtgatctgctcacctcagccccgcaaaatgctgggattacaggcatgagccgcctcgcttggccagcactcccttttctccacaacctggccagcatctgttaatgtttgactttttaataatagctattctgactggtatgagatggtatctcattgtggttttgatttgcatttttctaatgattagtgatgttgaccgttttttcatatgtttgttggacacatgtatgtcttcttttgaaaagtatctgtttgtgtcctttgcccactttttaatggggttgttttttgcttgttaacttgttcaagttccttatagattctggatattagacttttgtcggatgcatagtttgcaaatattttctcctgttctgtaggttgtctgtttactctgttgatagtttcttttgctgtgcagaggctctttagtttaattaggtcccatttgtcaatttttgtttttgctgcaattgcaaagccagtatttgaacccagattgtctaactccagaacccaccctgtctccaccatgccaggctgtctgcaaggcccttattggttctccatggcaacagggaaacagccctgatgcttcttactaacgtggtcccagggcctctgcttgcattcttctttttccatacactctgccgagcctggatataccttaggctgtgggaatcaaaggctgggtggtaccaggctgctggagccttctgtgtggctctggagtcagaaaactgtggagattttgggggggcacacagggagatgttgcagtaattccagtgagacatgactcactgcttatctgagaagttgggacaaagctgcctcttgtgaccataccgtgaatagggaagaaattgccaggtagaccaaacatcctcaaatgggttactgtatttttttcccctttttggtcctctccagggtaatctattacctggggaaatcagccttcacctgacacctcctattgtcatttacctggtgaacataaggggccatgtcacagctgtccttcccacccctgccacgtgttctggagagctggactcctcagcagcacctggtccacaggagagaagaatggggcagagccggagcagccaggggaggtgataaccacacgctcatctggtccccagctcttgcttttacatccacgccccacagggagacagcaattatctgttggccccactttacagatgaggacatgaggctcagagaggtgcagtggatgcccaaggtcacgaagccaggcatctgcaaaggcctgggacagccacgttttcagtcggggtggtattttctatccccggccccaagggctgagagtggttatccctgctggggcagggtcctcactgctccacccaccctcatctctgccctgagagcccccagtacagatgtccatagaacgggaaaggctggcgcccttcaaaggacgcaaagagcattggatgagcactgcccagctgatccctgcccaccttccacaggaagcccacctgggtgagttcttagagccttcctagtgctgagctgcaaagaaactggagccctctccccctccactgcagaggggacacagtgaccaggacggaagttgggggactgggtgtggggagaagccaccccactgcaggggccggggctgtccatctttgtacccctggttccatcccagtgcctgaggcatgggaagttcttggaaatgtagtcagatgctgggtgaagccccaggaggggccgtgaatgcttctgctgggaactcctagagtggcggcacagagagggtctttgctgcgaaggaacactcagagagtctctggctttcgtgaggttatgcctcaggagaggagacacttctccttttcattcgttaaacagaaatgatatttgccaccttttcttctctaaggcctaaagagatgacagaatgctgctggtcctaccctgagcgcgtggactccacagcggggtgtggggtggcccctggcaggcctggacggtttgttctgtgcttgccggtggacacgcttcagccctctgtctctattgccccaaatctggcctgtggctgctgggccgccaccagcttggagggcagggtgggccccgggagcccctgaccaccagtgacttcttgtctccagctgccctccgtcctcttgatccccctcaccccccaccacctcctcacaaagatggctgtgtgctgagggactgtggcttccctgggccctaggaaatttatcactgaggtttcagaggactctatgaaaaggatttggagaaaaagtgtggaaaataaacaagccagttcccagttcagcctctcctgaatgccgcaagtaaacaaccacctcggaggccagcccgggatgttcttatttggcctctgtggttacacctgccccctccccgcccagtccctcctccttaactttaagagcctcaaaagtcagggaacacaccctccgctggccagtccttgtgctgcagggacgctggtggctgggcacaggaggaacatgtatatgggagagaagacggccgggggtcccagctcagccctgctccctctgagtcagtcccaagcctggaccctccccagcaggcagacggtgacgtcttggttggttggtgagtttaactttgatggtgcagaatgatgagacttttctccattttgtggcatctgagaagctttgcttcttaaacattgctttagggtggatagaccaaagctaattttcccgttatgtctctccaagacggggcctacctgtgagcaaaccctcatagattcatttactttgtaggctacctggacaaaaatgtcaggtttctttgctttgggctggagtcctatcagctcaggggtggtggtgtaaggtcacaccaatgatttccagaaactcaagcactattctgagtgactaagtctgtgggataggaagcacattttccatctcttaataacttcaatttacttagtgaccaactttaaaaccaggcacccggttagaagggggagagccagggcttggcagcggagggtcctcaccttgcatccagggagtggctgagggcccttctcgttctctgtggctgtgctgagctgagtcagcgagccctgaagcctctgggatttggggagtggggcactgctggaaggttctggttcctgctttgttctgctgctgccaggcttctggagagggtggttgtggggtgagtcctgcgctccgcacgtccacatgttcgtattctacatattgggcttctgaaaaaagttctggttcataagacggcttcacagcttagccgtctgcagaccagtctgcaggttgatcagctttctgtcatgtgtgtgctgttcctgttcacacatgctgcgccgatgcccgcctgtgcctgtgccagccccagcccacacagctacctgagatttagccctgggcatctcccctaccctttcccgcttccccctcctctcctcccttcctctccagctgcctcgccatctgcaagattctggaaagtgctaatgtgtctgagccaaacagtgctatctgaggaaatattttgaaaacacactgggccacccccgtccccgcactgtgactacactgattttcagcaaggaatttcactccagccacagggcagggccgcaggtgcctggctttcctctggagacttccaggggcttgttagagacacggagagaagctgagggcctgtcctgcaggtttgatgtgtctgaagaggccccgagaatagaaatctagaacctgccagtcacgaagcagtgtcacccaccagaggatgaagaactgactgtgacctcgcaggtcacccacttgctttctttttaccgagacatgctatttctctttcacttttcttccttctcttgcatctggtgtaggtgcctgggggtagcgtgcccaggaaacaataatagtaagagcagctggtgtgcctaatactgccctgagcacctacaaggcgtcctcaccgagttctcaccagaagctctagaggtggctccggttattcccaccattttacagatgggaagacagaggcagacagctggataagttgctgacatgccacagccggtgaggggcaaagccgggcctgagccccacagctgactccagagtctgtgctctcagtaccacctgtgcgtgcgtctgtcccgttgtggctgcaccgagaggagaaacagcacacaggcattcattttcaaaccgtggccagtgcatgtcattgcgttctgactgggaagctctggcaatgttggcgttgcatggcctattgtgggcactaccagtgagcctcggccttctccaggtctgactccagtacctgccggctgccctgggcagggcattttggatcctgcctcagggtcttttgcccgctctgctgatgccactcccctgtgccctgacctggtcacaggaagggtgcagatggcagcgagtgtggtctcagttagcaagggggagctggcagatccagggacttctgcctccctagtggccattccagcaagacaggaaccccaccccgagtgatgtctggccctgtgacctttcagcaaatatttcttccccagcctcacctggactcggtatcccatgttccaaattgtcctaatttcccagacacacacaccctgctctctgtagccttcccagctgccaagaacattccctccttcccccttttccccttggcttggatgccaccttctcctggaagcctgggtggtggccctccccatggctgcccacaggtccccctcactgccctttgcctgtggtattatgattgctggttcagtgatctgtggtctgcaccaggcaatgggatgtgcaagggcaggacagctgtctgccttgtccatccttgtagcccccgacttagcagtgaatgctgctacctgattatggaaggaatgagtgactgatgtggcacagagccctcagtggggcaggcccagtccaggatgcttctgtgagggagcgcttcgagtctggggagggtggcaggagtcgtggtgagcgggaggggtggctaacgtgggccaaggaagggacagacaggaagagtgggaccccggcacatggcctcttgaggtcattaccccatgggtattgggctgggatactgaggatgagcctgaaacccttccagaagcccctccagtcctgccacttgtctgcctgcctgccctggatgcccgtttttgggctggtggctggctgcactctgggcccactgctcaaccccaccagcaagtggagagccattcaacagccccagggtccagttcccatctgcaagtaacgaggcctgccgtggctgagtcgtttccctgagcagagagaaggaagccctactggccggctgcctccccaggggtgggtagaactgttctgtggccccacctccagccctcaagctgtctgtccttgcaaaagtagtggggcacagagtgctgggttcttgggcatcacctgtccaggtcctgcgcgcctatgctcatgctgacactgcaagatggtgggataacaggagggactttcaagctggaagagaggagagctgggtgccccagtaaccacctttgagtcccactgtgatgagcccacagaggtggacatgagggaagacttggggaagccttcctagaggaggcaggcattccagtgcatgagggaagctgggcaaaggcacgaggatgggaaagttccgattgaagacagggactggtgaggagtctggctggactgaactgaaatgtataggatacacgaggagagacaggcaggatggagttgtggttacgcacacaggctctagagccgggctgccttcacgggaaccccaactccccacttactggctgtgtggccgtggccaagttgcttaccttctctgagctcagttttctcactactggtaccccccacatggggaagacatgggaataaaatgtatttctatacaagtgttgagagcagtgcctggcacactgagcatcaggaagggtgagctattattatataggtatatgttttaatgcagctagaaaaggaaattgaggtcagatcatagaggcccttgaatgtcattctttccattcactaagcacctgccatgtgccagattcttcacagtcattctcaccaagccccctacaacccggcaaggttgttagcaatgtctccatttcacagatgaggaaactgaggctcagagaggttgagtaacctgcctaaagtcactcagtcagggagagtcagagccagtaataacacccaggtctgctgtcgcttgagtcttccctcaaagtgaagattggagagacatggcaggggcatcacagggatgagccctgggctggggccgcagccaggagcagagcaggaatgtggcaactgtgggtccctggggcagggtggagacggggagagatgccaggcgggcctggagggtagggaggactggaggctacagcatacagctcaccattcatagcccagggcaaaccattgagtcatttggggaaaacatgacatcactgagtctcactgtctgccgcccacctgctgtctgccctctatggttctcctgatgacctcagtgccccaagtcctgcaaggggacccgcacaccccatgtagcagggccaggtcagcactccagcttcctgcactgggttctcctccccagccactgtctcccaccttcccaccactcccttccctgcctgggtcccctgccccagccctactcatacacactgctgaggcagaagcttctggaagtggtgatgggcatgaagagcttccagaagggcttccatgccaagcccttgattggaattctgggtggggaggggacagctcagaagcctgtgtcgagcttttagagttgcttttccttgagaatggtgcctgctgtttgggtgggatcacttttaaaaagtaaagcctggtagagctatgtgaccagcactatgccatgacctagaggagattcagactgacgggcaggccctgccttcctgcagaatacagttgagtgtctgagagttctttctgtactaagcatctttgaactgagtgctttattttcgtccatctgattgcgcgaggtagtcttattttacagatgccatccccgaggcccagagaggttaggcaacttgtccaaggccacacagccaggattcacacccataactgtccaactccagatgtgctcttagccactctgccatccggccacaaataaagccaccagagaaccacagaaggtggaacatatccaacatttgcccgataaattgtatagtgcagacaggaagtacagggagttttcatctcaaagtgtaggtcactccccagagtggcttgaagtctgtagatccatttaggagaacatccagcttcactggctgtgcaaatcccacccatgcggctgtttggggtgagaagtttctttaaatgtctgttgactctcttctctggaaggagcacgggggctcagggggcgcctgtcctggcattggtggccacacctagaaacggactatgaatcaagccaggggcccagtgccagcttccttggcctgtctgtgggcgcagatgccagcctttgcagctgctgctgcaactcacagctctctcccggtgccgccctcagtcaggccagctggagtggaggggccagtggccgtgccctgtgcagaatgacatcctctcaccttcacaagggaagcgtgattatccttgctttccaggtgaggacactgaggcctagagaagttttctggctgtctgagctcccttggcctgagctcccgcggtagaaccgagactcaagtcttctttctgcaggcagatggccagtttcttcctggaggagggaggagccagcttgccctctgacactgggtagcacagccctgttcgattctctgttcggggcttgcacttctgattcattctgcagtcactggctctttgtggttcgggaaaatgaccctctagggtaggagaaaagctcttggagcacttttgaagccatagaggccctttccaggctttggaaaatgttccttctccacccagatgccaacaccaccctggtcctggcagtacttgtccctggaagggcctcactgcggtgactcattacccagcatgcagcacattgccattgctctcagtgggcaggtgctgtggggacacgggtctgcgggcctgctgtcttcaggggtcccccatgccttttaacgcgtgtatcagtgtaccccaagcctcagttctgtgtagtttgtacaactctggcccctaccccaaggatttctgggaagcccccaggaatgctgataagttcacagtctgccctccccagccccagtctcatcaggcttcaggggtggccattcctcccctccaggagagagagaactcaaaccagtaactacccctcctcaggctcaggcccaatggttgctgtaataatttctggggagctgtctttgctcttgcagagaaggcaggccttgaattcagactggaggggccatttttcttccagttgccctcaaattttcctttctgtgataggatttgtcctttgtctctgcttaaattcaaagacttgttaaaatgacttttctcaaacaagaggctaccctcaaaagaactttgcctctacggatagaaaactggaacctacttttattttggttttagttttattaaattgtataaaatcaataatacatgtccatggtgcaaagttgaaaaggcacaaaacagtctatgtgtggtctctttcccatgccggactcagacactcagcattgttagttttgtgtgtgtgtgtaagctgtgtttaaattgtccagctttaaaacaaaacccttccctgtttcacaattaggttgaccgaggcacaacctgaaaaataacctggaaatagcatcgggccccctgcagcgtccagctcttcccgaggactgttattatgataacgatcattgctaaggctgtcccttcccaaaaagtgttgctgcccacagtcccagcccccagacctgagcagtcacccacacagcatgaatggggccagccccagcctgcccgctcagcttccaagcctagcagtctcaggctctgggctaaccctggcctcccagctgccccttcaacattgtcccctcttgtcttgcagggcagtagccacagctggggctgtggggtcagggcatggcaagggtgatctgaccaaactatgctgcctcttagccagactgtatattcggagtcccctaagctcgatttttttttttttttttttgagacagggtctcactctgtcacccaggctggagtgcattggtacagccatagctcactgcagccttgacctcccaacctcaagtgatcctcccacctcagcctcccaagtaggtgggactacaggtgtgctccacctaatttttaaatttttttttagagaaggggtctttctatgttgcccaggctggagcttgattgtttgtttgtttgtttgtttgaagacagggtcttgctcagttgcccaggtttgagtgcagtggcgtgatctcagctcaccacaacctctgcctcccagattcaagtgattctcctgcctcagcctcctgagtagctgggattacaggtgtgcaccaccacacccagttaatttttgtgtttttagtagagacagggtttcatcatgttggccaggctgatttttttatttttttaaagaaggtctcccaccagctggatctgagccactggctgagaagtgaagtccatgaagcattcagcaatagtaacagcaccaccacctcctcatattgaacctgcctctgtgcttcttcctacgccttcctatgcctctatgctgacttctggagaagccagtcacttgcccggtcacactgtacaaagtggctcagggctggactcactggcttatgcctgtaatcccaacactttgggaggccaaggtgggtggatcacttgaggtcaggagtttgagaccagcctgaccaacaaggtgataccccatctctaattagctggacgtggtggcaggcggctgtaatccagctactcgggaggctgaggcaggagaatctcttgaaccagggagacggaggttgcggtgagccgagatcacaccattgcactccagcctaggcgatagaccgagcctccgtcttaaaaaaaaaaaaaaacaaagtggctcagctgggcttggatctccaacatgctgggccccagtcaccagattcctaaccccgtgctgccaggcttccccggacaatatcatgaactcaacaatccgctcccttcctctgcagggcaacctctcattccccagagctcatttaataacaagagtagtaatcatagttaaccttctttaccctttactatgtgcaaggcattgttctagaagcgcacacatcgatcatttagtcctcacagcgctcccatgtggtaggtgctgtccttatactctttttgcagataagcccaaggcacaggagcctgcctggtaagcagcccatgtctaaagggcagtgaagaaccggcctctagggaatgcagggctcctcttgtacccagaggggaggcgccctgcctcttctctgttgagcctttggaaatggcctccgaggggcccctgctcagcacagctctgtgggccaagagcaggagtgtttgaggcacagatagacgatgtctggacccctccccaggatgcctccccatgtctgaccttggggagtccagtgccaagggggaagttcaataacataccaggtttctccttggccctgggacaggttccttccctttccttccctcctccctgcatccttccttcctttcttccttctttccttacatatttattcagtgccatacagcgatagcgcacacgtgttacctctaatacaaggtgaaaagtgatatgaatggtgcaaggtagagagaggaatggtgctgggagaggaacgtgtggtaggaggccctcccttcacatcctggcctcaaacctccagccggtggccttgggcgggtcgctcagcgtgtctggacctctgtttctcatctggataatgaaggagagggtggaggtgaggacccaggttgcctgccaggctcttgtgagaattggaggtgtaaaagggctttcttttttgtttttttagacggagtctcgggaggggggttagatggcgggagaggggttagatggcaggagaggggttagactagtcccctgggggattggttatggctgtgggggaagtcggagggaggctctggggatgtgtagggtttgggctcggccttaagggatgggtggaatttggccaggcacagatgggggaggggtggtgctttgggcatcaccagccctaggctcatggttgccaccctcccttccggtaccgccttcccttttctgcatttccacccagagatggactctcagctttgaattctttttaggaagtgactttattgtttttattttttttctctatctaaggtagtcagaatattatttttgtgataatgctagatgcttagtatgtaaaattcaagtacaatgggtaaatacagagaagaatgcagcaaatcaccaccactcccaccacccagatggaactgtttagttatttggtccgtatgcgtatagacacctcagtaggcctacccggtgggtgggagtgggagcatgggggctggagggccagaaagttttataagcacagggaaaatgcacagtttaaatttaccttcaggccagagttggaaagattgtctcacctgaaacagtccttcccttctgtccgctgcctacatgactgtatcggatggggaaagagggaatggggaactttcaggccatggccttcaaaacctccccattcagacaaattacagaaaaggagccagtctcagtgagcatattccagctctagaacagtggctttccaacttttagactaaaacctcagacacagacacccacacataactgaaacaaaagccttatgaaacccatattttagctgggcacagtggctcatgtctgtaattccaaacactttgggaggccgaggtaggaagatcacttgagcccaggggatcaaggctgcagtgtttgcagcgttgtactccaacccgggcaacaaagtgaaaaaagaaactcatgcttatcaactcatgcttatcattatgatacagaggcattctgatattttctaatctacacaatgctgttgtgtttaaaaaagaaaaaaaaagcttatcttaacctaccaaattgttggcacagcctgcagtttgagaaatgtcactgttgaccagcgattttcaaacgttcgtgtgcatcagactcaactgcagagtgtgctaaaacaatctgctcccctctcctgaggttctgagtcattagttctggagtgggacctgaggattcgcatttccaccaagttcccaggaggggctgatactgccagtctggggaccccactttgagacccaccctcctggggtgtttttaaggcaacatgctcccttggcaaagaccatcaggggatttgctttattgaatggatgagaattgctgattgctaacatccgaacggtggatctctgagatacttgaggatgctggtcaggcattgtcgttgggatctttaacaccaccctcctaaaatccagctcacactattaatataaagtgttgcatgtagaaaaggcctgctaagcaaagggacatttatgcctagccctagttgaattccctgcctctcaaatcccagacctgcagaacataaaaccctcccagcctttctgaaaacactgttcttctaaaggcaatgaaaggcgctatttagcatgtgggtttcaactttctgttttttcaaagggaagaaggtaggtcaagcgtgactgccccatggggaaggctgtccccgctggctctggtaggggtctggtgggtttcactggcggtccccagtttcccagctttaaccggaaattttcctggcattgtatcacgcggcagcacctcggccttgcagcctgccagctttggagactggcctgtatcccaaactgcttctgctctccaaccagggactgtcagcccccacccctaagcctcctcctctgtagccttggggcctccatgggcccctccccagcctcgcagccctccagaagccagccctcagctgggagcagctttgcgagggaggggaatgttcagtgggcacagagcacttctgttccagtaacaatggcccgttgatgactagattctgcccaggtcagctccctcaactggactttgaggaggagaaaggactccagcccccccaggcagccatttctgggtgtgaggttgattcagaggcctgagcctctgtctgcccacagaacctcattcttcaggccctggtgcagcagggagaaacgcccatcccagggcagtgtaaggccccaggagtgattccgttctgtccaattcaacagtcagttattgaatagtcctggccactgaggtttggtgctaagtagctgtggggaataagaataactgctgacatgaattcaatgcttcttactgtcaaccccgcccctggctgcccagtagtctctagggaacttataaaaattcccaggcacagattcctcccacctcagaatcttcaggggtgaacccttggcactgatattttttaaaagctctcagagtgattctcatgcccagcagggatgcagcatcactggcctccagtctgtcagatgctgtgctaagcatttaacttggagtaccccatttaaggaagcaggtgcttatgggatgctgaaatgtggcccccacagatgtccacgtatgagccaccagcacctgtggatatgtgagcttgcatggtaaggactgtccagatgggattaagttaaggattttgagttgagagattatcctggattatccaggagagccctaaatataatcacaagtgtccttataagagggaggcagaagatttgactacagaagaggagtgtcagaataatgcatggtgaaaaaaactatcagccattgctggtttgcagatggaggaagggggcatgagccatggaaagcagatagcctccagaagctgggaaaggcaaggctgcagactctccagaaggaacccaggccttttggcaccttcatgttaagtcagtgaaactgacctcacacttctgacattcagaactgtacgataatcagtgtgttgttccagctgggcacggtggcttatgcctataattacagcactttgggaggctgcaacgggaggatctcttgaggccaggagtttgagaccagcctgggcaacctgatgaaacccctgtctctacaaaaataaaaaaattagctgagtgtggttgcacgcatctgccccggctattcagaagctgaggtgggagaatctcttgaacccgagagattgaggctgcagtgggccatgatcatgccactgcactcagcctgggcaacagagcatgaccctgtctcaaaaaaaaaggaaagaaagtaagtgttatttgaaggtactaagtttgtggcaatgtgttacaacagcagtaggaaacagatacggggctgtcattaaccctgctttacagatgaagtacgggggccaggcagtcacctgggctcacccagctagtgggctaccgagctggaagaaccaggttgtccgaccccttcttcactgcccaccacacctcaccacactgccccctcttggcagtcagacagacatgggttcaatctcagctctgtcatcttctgtctgtgtgtcctgtgctgctggtgaggcttgtttggccagggggaggccccaggaaggggaggggtggagaccagttggaaagatagggtgggccaggttgtccccaggtggaagagtttggacttgattttggaggaatggagcccacagggcactgtctggtctcctctgccatatttcttgatgatgcctcagacccgcaggcctgctcagtctttgagatctgacataatgcagcaacccagctcccattgagaacctcaggattgggaccagaatcatcattctactccttgtcacccacagccagtgacagccatttatctgggacggccagtgagctcctgtttcccaggaagccagcagtggccctggtgcctccaaaatgtttcttccaagattctcctagaaccatgcatttgggaccatgcctttttttttgaaaaggagtcttgttctgttgcccaggctagagtgcagtggctcaatcttggctcactgcaacctctgcctcccgggttcaaacagttctcttgcctcagcctcctgggtggctgggattataagcacatgccacgatgcctggctattttttgtattttcagtagagacggggtttcaccatgttgttcaggctggtctggaactcctgaactcaagtgattcacctgcctcggcctcccaaagtgctgggattacaggcgtgagccactgcgcctgcccaagaccatgcatattttttagagtaaaagtatgaaatacaaacaaatacagagagttttccagatgaggcaggaaaatagggtctagaggcagggaatgtaaggccaatcacacttcagctataacaggaaataccctctccatagctcgtgctctgtaaatgactttgtaactttacttcatcctctccatttacatagggcgtacccaaaataacaaatggaatcctctagagggtatttaaactccccaaaattctgtaacgggccttttgtttgtttgtttgttttgagacacagtctcactctgtcacccaggctggagcgcagtggcgcaatctcagctcactacagcctccgcctcccaggttcaagcaattctcctgcctcagcctctcgagtagctgggattacaggcatgcgccaccgcacccagctaattattgtatttttagtagagacggggtttcatcatgttgtccaggctgggttcgaactcctgacctcaagtgatctgcccgcctcagcctcccaaagtgctgagattacaggcgtgagccaccatgctcggctgacggccttttgagctcctgtgctcgggccgccccacgctgtggagcgcactttctcagtaaatcccttcatcccttccttgctttgtgcgttttgtctaactctgtgttcaagacaccaagaacctggacaccctccacctttaacacaaagccacaccacaagttggtgacaggtcctgaaagatcagttcctgactaggactctgatctgtccactgctgtacagctgctcccttctggctaaatcagcttgctcagacacagagcatagtggttgaatttgtggactgtggagccaggcttcctgtgttccgatcccagctctgcctttaactcagggtaagttttctcatccccttgcctttgatggggatggtgactattatccataagcattatccagggttcttccaaagattaagtacatttatgtacatgaagtacttggaacaattccttgttcactgtgttaacttctgttactattcagctcctctagggcaggggctgtgtcttttccttcctgttcctagtgcctggttccatgcttggcccagagcaagtcctcagcaaatgaatatacttgtttcatgtgagcttttgtcactcagagattctttaggtactttcccaaaagcttgcactcttacaaatttccatcttagttcttcaaatctttcttctcctccttcctgccgcagaattgccatagagcagcctgaagcttgctctgccccttgcaaagtccagtgagccgttcaaagataacccagatgtcccaagcctcccagccagagtgcctgtgctgcgcagctggcgtggttgccccagtctccttcgccccaaggccatgcttggccgaccccctgacccgctgaggttgcgcagagctttttgggccctgtagcagcactgcttgggcaccaagccttgcatggtctcatgggactcactgcctgcagccgctagtcccagctcccctccttaccagaacccacaccatgttgtccagctgatgggggatcacatatcatgctattccctccaggatcctgtcccctgtttttctccccctgccatgaggagtagcatcctcatttagcctttccctcagaaagtccccacgcttatcactacacatgaatagatcccaggaaggtcactttctcatggttctgcaaaaagccaaactccagttgaggtccagtttgaacccaactagttcactcctctgccctagaaaggccatttctgctcaatcttactgccccacctctacttccaacttgcaaagatctcttgaaaccctgcctcctgttgtgggagctagttttcttttcttttttttccttttcattacacagtttcattttgacataacagtagattcacacgcaattttaataaattgtacagagaggtctcatgaatctgttacccacttccccctatggtaacattctgtgaaagcctagcctaatgtcacaatcagaatgttgacttcatacagaatcccctgtggtgcccttttataactacactcacttccctcctgcccccaccccttccttgacccttggcaatactagtctgttctccattcttacagttttgtcatttcaggaatgttctataaatggaattatgcagtgtgtaaccttttgtgattggctgttttcactcagcacagttccctggaaattcatccaagttattgtatgtgtatcagtgttgtttttttttactaagtaggtaaaacaagggacacagacctgttctcctggcatccctccctggttagcaagagattcagcaggccgctgccactctggccttgctgatagctagtgtgtgtgcaggcagcagctcccgctgtctgtaagagcgccagggtagtgaagttgggtgctctaaaagtagtggctctccatctttgctgattctaggttagaatcacctaaggagctttaagtaatcttgatgcccaggccacaccaatgcaatctgaatctggaggtggcacccaggcctcagtgatttgtaaacttctctggatgattcttatgctgtcagagttgaaaaccagtcctctaaaacagccgcagcagattcacaatagctgtgccatcctccacccatgatagatgtcacagagcaatcgcagcactcgtattttcaaatacggcgctccaggcagccccttcccatctgtcagctttggcccggggtggaaattgacttgccctcttagctgagaaaccgtttggccatggccatgtccaggtgtgcccaggcccgaggcctgacatgttaggtgagtgtccctgtaagtaatgctggaaaggtgggcccttgaccgataggaatagttgcagcaggcagagatcgcctggggctggttctataagataaacccgaagtggatcagccagtgtccctcccctgcagcccagcatggggagagatgtacccaagaaataccaaccaacagtgccattggcatagacgggctctggctgacatttgttcagaccagcaataatgcccagcctgtgtgcaatcttcccaattttcggagctcacacagcttccttgatgctcacaacaaccctgtggggccagcctaagctcagagaagttaaattcctcacccaacgtcagcagagagtaagtgggagagctgggacccactccaagtctgtccgagttcagggccatctgtccaacgctcagagcagttagacaattgacctctgtttccactggcagaccgagtgtagatgggctcctctgtggccatagatcagtcagaggatagcagcagacacatgcggaccaagcctcctgctgcccaagacccctgtggcccctctctccctaaccgctgcttctcctacagatctagtgcagagatgttggacagaacacaagaggttgaagtcagggcgggagcaggaaaaaaaaaaagaataagaagaaaagaggctggagttcctcctttcatcacaggaataaaaccccttcctgctgtcaatgggaccattaagtgggagtttgaggaagctccagaggattcaaattctgttgccactgtatagaaacagaggagaccgacgcagtgactcacatctgtaatcccagcactttgggaggctgaggcgggcagatcacttgaggtcaggagttcaagaccagcctggtccgcatggtgaaaccctgtctgtactaaaaatacaaaaaaattagctgggcgtggtggtgcctaactgtaatcccaactactcgggaggctgaggcaggagaatggcttgaacccgggaggcggaggttgcgttgagccaagattgtgccactgcactccaccctgggtaacaagagtgagactgtctcaaaaaaaaaaaaaaaaaaagacagaggaaatagaagtagggttggaagaaaacagggagcagaagaaattctcctctctgtcctgtcccttacttgatcattctccaggatcagaaagcctccttagaaggtcaggaaggaggatagagcaagaattagggatcctagacttatgcatggagagtttttctctacccggttatctcagaaatcctgtaatggagccgtctttccagaggtgcagaacaaaatgggaagctgtggccattgtgtagccattgaaggctagcccatggtcccctcacagcttccatgggcttctcccgagcatgtgcacgtatgatgcacccattgcatgtatacgtacatgcacacatttctggtcaaaaggttgatgattgataaaactgacaaaagctccaaaccccacaaatgagcacagcgttttgtaataatgagcatgaccaaaatgggaaaaaatagggcacatgagggatgagggaagaaaaaggactccagggcccagaagattcctaggcttccttagccacctcctcctaaagtaggggtaataagtacatggcacatgtgccagcccttcccctgtgatatagttgggatatttgtccgcacccaaatctcatgttgaattgtaatccccaatgctggaagtggggcctggtgggaggtgtttgagtcatgggggtggatccctcatggcttggtgctgtcttcctcatagtgagttcttgccagatcaggtcatttaaaagtgtgtggcacctccccattctctatctctcattcctgcttttgccatttgaagtgcctgctcctgctttgctttccgccatgattgaaagctccctgaggcttcaccagaagccaagcagatgccagcaccatgcttcttgtacatcctgcagaaccaagagccaattaaactgcttttctttataaattacccagtctcaggtatttctttatagcagtgcaaaaacagcctaatacaccctatctatacacacagcagacatcactactcaactgccatgttctttcccacagaaaacaagcctgatctcaggattcttctcatcaaagtgctccaggctgccaattaccaacctattagcttttactcatgagatgaaaatgatttgccaggccgggtgtggtggctcacacctgtaatcccagcactttgggagtccgaggcaggtggatcacttgaggtcaggaattcgagaccagcctgaccaaaatggtgaaaccccatctctacaaaaatgtaaaaattagccgggcatgctggcactcacctgtaatcccatctactcaggaggctgaggcaggagaatctcttgaacttaggaggtggaggttgcagtgagctgagattgcgccactgcattccagcctgggcgacagagcaaggctctgtctgacagaaagaaagaaagaaaaagaaaggaaggaaggaaggagaaaataatttgccagcctcagcttgagcccaggagttcgagacaagcctggacaacagggaaagaccctgactctccaaaaagctttttttaaaaatagcgaggtgtggtggcacatgcctgtgatcccagctatttgggaggctgaagcaggaggatcacttgagtccaggaggttgaggctgcagtgagccatgatcacaccaccgtattccagcctaggcagtggagcaagacccgtcctcaaaaagaaaaaaaaaagttggaaacctgatacagtcaccatttttgtcaggatccctcttgcttgttctgggttaggttcatcacaaagctgcttagatggacttggttattcaagtaaatattaagcgctaactgtgtgtaggatgatggattgggacacaactccatatgctttttatttccattatttttataactttctcttatattgatattttagtaacatggtaacaaatttaaacaatagaagaaagtagaagttaaaagtcagtgacagttcccacccattccccagttccctcaaccactcttgtcaatctcttctttccatctccaaagatatccagcatttgcatggatccagtccagtttgtaggcagttggtagcatgccacgcatactcttgcccttgcttttatcactcatgtcttgaacagcattttatgtcagccctccagaacttcctctttctttttaatcattacagagtattgcactgataaatgtacctaacattgagctaacaagttgctgttttttgttttggttttggttttgcctattaacatgcattaatgtcatggttagccttttgtaattataatcgatttattgttgtatatgtccttgttgtatccatgcaaatatatcagcaagattagttcctagaagtggaattcctgggtcgaagagtgttatagcagtcctttggggctgctataacaaataccatacactgagaaacttacaagtagcagaaatttattgctcatggttctggaggctgggaagtccaaaatcaaggagccagcagatttgatttggggagggctgctctctgcttccaagatggcacctacctgtggcgtccttacctggtggaaggagcagacaagctcccttagggctctaataatttttctttttttttttgacacggagttttgctcttgttgcccaggctggagtgcaatggtgtgatcttggctcaccgcaacctccacctcccacgttcaagcaattctcctgcctcagcctcctgagtagctgagattacaggcatacgcctccatgcccagctaattttgtatttttattagagatggggtttgtccatattggtcaggctggtctcaaactcccgccctcaggtgatccacctgcctcggcctcccaaagtgctggaattacaggcatgagccaccatgcccagcctctaaaaagaacactaatcccattcatgagggctccacactggtgacctagtcacctcccaaaggccctacctgttaatgccagcacactgggattcgattacaacacaaaaattttagaggggcacaaacattcagcccatagctaagagtatgcatatttaaaacttgtgatggtttggccaaatcatccttcagaaaggacactcccatgaacattatgtattaggacgggacgggctatgctgtaggaacaattagtcccccaaatcttagtatttaacacagcaaaggcttgttttttctcttgcgtcacatctgatgcagatggggtggctctctaagcagcatcccagggatccaggctgcttccattgtgaactaagccagttggaacatgtggcctccactgttgccacagccaggggagagaggcctggatgaatgtgtgggaaaattttaagcaaagtggcttacatcactttcacccacatcctacctgtcagaaccagtcatatggcctcagcctgactgcaaaagagtctgggcaatgtggaggagcccctggccactcgatgagcctcacgtctctgccagtcggttccccagaaattcacccacacagtatattccagggcgttttgttcttcgctaattaaatatatgaaaaatggcgtcatgtagactgtcgttctgccctgcacgtctgtgctttctttgggcagttgccctccgcctttttctgctgaaatattcataggggattatgttcactccagacacactccagtggccttccccaaattttcccaaaaccccaaaaccttttgtggggaagccctaagacattctatattttggctgttacaggcatacctcagaggtattgcaggttcagttccagaccactgcaacaaaattaatatcacaataaagcaaatcacacaaatttttttgtttcccagtgcatataaaatttacatttacacggccgggtgcagtggctcgcacctgtaataccagcactttgggaggccaagtcaggcggatcacctgaggtcaggagttcgagaccaccctggccaacatggtgaaaccccgtcactactaaatatacaaaaaattagccaggcatggtggcaggcacctgtaatcccagctactcgggaggctgaggcaggagaatcgctggaacccgggcggcagaggttgcagtgagccgagatacatgccattgcactccagcctgggcaacaagagcaaaactctgtctgaaaaaaaaaaagttacttttatactatactgtagtctattaagtgtacagtagtatgtctaaaaaaagtacataacttaaaaatactttatttgctgaaaaaaatgctaacaatcatctgagactttagcaagcgacttgtagtctttttgctggagagggtcttgcctcaatgttgatggctgctgactaactgctgaagagtagggtggctatggcaatttctttctttctttttattttttttgtttttgttttttgtgttttgagacagggtcttgctctgttgcccaggctggagtgcaatgccacaatcatggcttgcagcagccctgatcaccttggcaatgccccgacctcagccttccgagtagttggaaccacaagtgcatgtcaccacacccagcctatgtttttattatttgcagagacacagtctcactatgtttcccaggctggtctcgaactcctgggctcaaggagttcctgggcccgcttgggcctcccaaagtgatgggattacaggtgtgagccactgcacccagccacaatttcttaaaataacacaacaataaagtttgctgcatcaattgactcttcttttcatgacggatttctctgtagcatgcaatgctgtttgattcacagtagcacttctttcaaaattagagtcaattctttctaactctgctgctgctttatcaactaagtttatggaatattctttttttttttttttttttgagatggagtttcacttttgttgcccaggctggagtgcagtggcacgatctcggctcactgcaacctccacctcccagattcaagcaattctactgcctcagcctccagagtaggtgggattacaggcgtccgccaccacgcttggctaattttttgtatttttagtagaggcagggtttcaccatgttggccaggctggtcttgaactcctgatctcaggtgatccacctgccccggccccccaaagtgtggggattacaggtgtgagccaccactcccagacaatttatagaatattctaaatcaagcttgtccaacccgcaggccacgtgcagctcaggacggctttgaatgtggcccaacacaaatttgtaaattttcttaaaatattatgagattttctttgcgttttttgtttgtttgttttctcatcacatatcgttagttgttagtgtattttatgtgtagaacaaggcaattcttcttccagtgtggcccaggaaagctaaaagactggacaccctgctccaaatcctttgttgtcattcacagcatcttcaccaggagtagcttccatctcaaaaaccactttcttgactcatacataagaagcaactcattcattcaagttttatcatgagattgcagcaattcgctcatatctgcaggcttcatgtctaattctagttttctcttattacttccaccacatctgcagttcatttctccactgaagtcttaaacccctcaaaatcatccacatggatccacttcctccatccacttcttagcatccacttcttctaaattagcatccacttcttccacattcctattcatgttgatattttcacctcctctcctgagtcacaaatgttcttactggcatctacaatggaaggttttcagtttactttgcccagatccaacagaggaatcactgtctattgcagctatagccttacaaaatgtatttcttaaataatgtaacttgagggtcagatatggtggttcacgtctgtaatctcagcactttgggaggccaagggaggaggattgtttgaggccaggagttcaagaccagcctgggcaacatagtgagacatctctacaaattaaaatttaaaaattagccaggaggccgggtgcagtggctcacatctgtaatcccaacactttgggaggctgaggtgggtggatcacctgaggtcaggagttcaagaccagcctggccaacatgatgaaaccctgtctctgctaaaaatacaaaaattagccaagcgtggtggcgggcacctgtaatcccagctacttgggaggctgaggcaggagaatcgcttgaactcgggaggcggaggttgcagtgagccgagatcacgccactatactccagcctgggtgacaaagcgagactccattcaaaaacaacaacgaaaattagccaggtgaaataccatgcacctgtagtcccagctacttgggaggctgagacaggaggatcacttgagcccaggagtttgaggctacagtaagccataatcatgctactgcattccagcctgggtgacagagtaagaaaaccctgtctcaaaaaaaaaaaaaattaattaattaaaaaacagacttgaaagtcaaaattactccttgatccatgggctgcagaattaatgttgtgttaacaggcatgaaaacattactctcctcttacctgtccatcagagctcttgggagaccaggtgcattgtcaatgagcagtagtattttaagcagtaggtgtcaacagtgggcttaaaatattgaataaatcatactgtaaacagatatgctgtcatccaggcctgttccatttacaagcacaggcagagtacatcttgcttaattgttaaggtccctaggagttttagaagggtcaacgagcattggcttcagcttaaagtcaccagctaccttagcccctaacaagagaatcagtctgtcctttgaagctttgaagccaagcattgacttctcctctctagctatggaagtcctagatggtatcttctttcaatagaaggctgtttggtctacatcgaaaacctgttgattattgtagccaccttcgtcagtgatcttagctagatccttgggataacttgctgccaattctccatcagcacttcctgctttaccttgcacttttatgttatggagatgtcttctttccttaaacctcatgaaccaaccaacgctagcagcttccaaattttctgcagcttccttgtctctctcagctttcctagaattgaagagagttagggacatgctctggtttaggttttggcttaagggaatgttgtggttggtttgattttctatccagaccactcaaactttctccatatcagcaacaagtctttttcacattattataatttgtgtgttcactagagtagcccttttcatttccttcaagaacttttccagccgggtgcggtgactcacgcctgtaatcccagcactttgggaggctgaggtgggcagatcacttaaggtcaggagttcgagaccagcctggccaacctgatgaaaccccctctctactaaaaatacaaaaattagcctggtgtggtggcaggcacccgtaatcccagttacttgggaggttgaggcacaagaatcacctgaacccaggaggtggaggttgcagtgagccgagatcacgccactgcgctccagcctgggcagagcgagagtctgtctcaaaaaaaaaaaaaaaaaaagaatttgtctttcgcactcacagcttggctaactgtttggtgcaagaggcctcacttttagcctttctggctttcagcattcctgcctcactaagctccatcatttctagcttttgattttaagcaacaaaagcgtgactctttctttcacttgaacacttagaggccatggcagggttattaattggcctaatttcaatattgttgcatttcaaggaacaaggagaggcctggagagagggaaagagaccagggaatggctggttggtggggcagtcagaacacagacatttatcgattaaatccattgtcttctatgggtgtggtttgtggcaccccaaaacacttacaatagtaacatcaacaatcactgatcacagatcaccataacagatataataataatgaaaaaatctgcactattgcgaaaattaccaaaatgtgacacagagacacacagagagctcatgcttttggagaaatggcactgataagacttgctcaagacagggttgccacaacctttgatttgtagaaaacacagtatctgtgaagcataataaagcaaagcacaataaagtctgtcctgtttgtattcacaaaaacatataaaggcatgtgagtaataatataaaattagctgggtcaagatcgttgccagctgtggtgtggaatggattggcagcagttctgtgccatttcccaggctctctgtgcctccacctcctccctcattcatgaaagacaagccaagcaagggacaaaggtatacaatagttgctgtaaatgtccctatttcacctatgagaaaactgtactcaaagaggtttaaattccttgcctaaggtcataggacctcaaagacaataagcaaaagcaaggaaactgaacgcactcatagctacacagagattcattgctaactttgtcagacgttgtgccaagactctctctctttctctccctctctctgtctctctaccaacccccccccaacgtatgtgtctctgcgtgtgtgtgtgtgtgtgtgtgtgcatatgcatgtatacacccacttttttttttataaaatagactgcaactggagatactggtgtgtcctattttttggtgcagcgtcataacataagcatctttctaggcaataaattaactttatgctggccttcttttttcagtggagtattaattaagcatcttgtatgtgcccaatattctgctggttctgggggaagaaggccagcctacaggaaacaacagctaactctttaaggcagtgcataagtccattcatttgcttcacaaacattcattgagccctgccacgtgccaggcactgtgggtatcgtggagaacaagactactgtccgaggcaagagctgggctcctcctagcttcctctgtccccctaacctcctctcacccacaggcattgctgggggtattttcctgggttggttggtttgttttgttttttgttttgttttgttttgtttttttgagacagggtctcactatgttgctcaggatggtctcaaactcctgggctcgagcaatctcctgcctcggcctcaccgtgcctggccgttgtttatttatttattgtggtcaaatgtacatagcataaaattgaccgttttaactattttcaagtgtacagttcagtggcactaagtacattcacactgttgggtaaccctccccactcttccactgcagaacccctttcatcttgcagaaccgaaactgtccccattaaacatcaaccccccggcccttcatcccagcccctggcagacacccttctgtctgcctctatgattttggcgctctgggtacctcatagataagtgagattgtatagtatttctcctttggtgaccagcttatctcaccaagcgtgatgtcctctgggagcatccgtgtggaagaggtgctagcatcattttgacttctcaaacatctcgtgggtgtcacctccccctctacctctctgccactgcctcgctcagccacctgctctctcctggacccttgcagaagggactgactgggctcctggcctccagtcctgccctcttctaatgtatttttcataccacttccaaagtgataatacattcctcttttgaaattttagatttggttactaaagcaatacaggtgtatggttaccaaaaattcaaacagtgtaaaagagaataccagcctgggcaatgtagagagaccctgtctccataaatttttttttttttttttttgagacggagtcttgcagtggtgggatctcggcgcactgcaacctccacctcccgggtcctcattcaagcatttctcctgccttagcctcctgagtagctgagattacaggcatgcgccaccatgcccagctaatttttgtatttttagtagagacggggtttcaccatgttggccaggctggtcttgaactcctgacctcgtgatccacccaccttagcctcccaaagtgctgggattacaagcataagccaccacgcccagtctccataaatgatttaagaaaaaatgtagccaggcgtagtggcacgtgcctgtgctcccagctccttgggaagctgaggtgggaggattgcctgagtgtgggatgtcgaggctgcagtgagccaagatcatgccactgtaccccagcctgggtgacagagtgcgaccctgtcccccccaaaaataaataaatcaaagggcataaggtgaaaagaatcgtaacattatgtttttgtagctctgcctctgtgatggtgccccctgcatggcttgctttcactgtgccaatgcaccacagttacccagcctgccggctctgataagatgctcgccatgcttctcccatgctggacttgggccacgtccttgggcatgaatcttggtctatgtccaggtcggttctgaatgagccagcagactcctcccggggctgcccggctacatggttgagggcatcctggacaccagcttcagccacagctcctgaccaggcaggtgcagtgaagccgggaggtgtaggtcagttcctacctctccaacctgaggtcctgcacttcctgcagctgttggaagggatcgtatccaatgggagcaagaaagtgtgctcccccacagccccactcaggcataaagggccgaggggcagccaggcctgtcctggctagggctggctcagagtctgtggcagccccacccctgccaggctggcccttagccccaagatccacctatggcactcgcccctttacagctacgtggacatccactgacactcaggtgacacacctttgcctgcttctactcagtcttggcagcagttggacaaaaggaaatcaaagatcggttctttcttgggagaggaagagcaagctggagccctggggtgctcagatgctcttgggagtaacatagccccatagccccggggctatactgggtgcaggggggtggaggtggtgggggagctgcagccaggcattcattcacttcccgttctttcattcctgctcttcttttgctcactgactcattcagcagcctctgggctgggcgtttactctcctgtcaggcaacacactcctgattgggtggccttggccttcccaagctgtctctggctgtccccaagtgaaacggaatctgggctggacaggccaccggatggacaagctcttctcatctaaaaccaaggcagttgacattgtgggctaaatgataagaacaaaattaaaaaataaaaaccaggcaggctggcataggagctccatttccctgccctactgtgccagtggcctgggggctcccctgccgcctctctccactctgcagattctgagaaaactcacaaaagagcccactccaaggtgtttggcaacaaggtgggggcagcctcccagcacccagcacacatggagctttcccgcagtgggtttcagcgctcccactctgcctcggagctactctgtcaccagctcttgccctcccttggctcctctttcccatgcagctcctcctccagctcgtgggaaaggccgagaggccgggccagcaacagctgagcatcccctcaacctctccctaccccaccccaccccactgtgctcttggccccaggcaggcgaggggagtggagttttgctgcctgatgcaatgtctggcagggccgtcccttatcacagccgacttgctgggacccccaccttccccggaggaggccggaacaggccgcagtccattttgggcctcagtggaagggcctggttggaggccatccaagtagaaaactcgttctctgggaggcaccttgccaagtcacgagggaggcctgagcagaaagacccctgggggagagaagggagggaagccgaagcctcacttgctggggcttgcctggcctcagctcgcagccccctttttccacagcgttctctccctcacatttgtctgcagatggcttaggctgttttctgccctcccccttgttaccccacagctgtgagaggctggatggaaacaagaattcaagagactaaagttatgtgcggtcccaagtgtgaagttttgcccacagttggtggccatggttcgcaccgtggtcccagcacacgccctcagcatgcacctgtggcccacacgctcatgctcacagccactcatgtatggagcaattgcctttttttcttcctcttcatatcttctgtcaacttagaacgattaagcatcttgcagtaggctcaatgctttgggaaggacattgattcgttcattcattcattcattcattcagcaagtatttatgaagcacccactctgtgccaggtacagttctgggcactggagatgcaagggtggagcagacagatgaagctctcctctcccggagtcaacgttctgggggatgagaggccatcagcaagtgcatttccatctatgaagggagtaaagcagggcgccaagagggaaagtgatgggggtggcccacattaggtcaggggtcagggaagtactccagagctgggggggcatttgagctgagtcctgattgcttagaaggagccagccagagcagatctggcccgggcagaggtaccagctgatgcagaagcccccaggtggggagtggcaggaagggccagggtgggggtgttgggagaagaggtgggaagggtgagcagggtctggatcttgaaggcccttacagggcttttattttaccaagtagtgcatagagtgtttgaagcagaagctgccttattgtctgtgcctccgagaagtttccatgtggctgagaagctgggtggcagcacagttataatcagtgctcaggtgttcccctgtctgggtggctgcccacatgtgatcccatagaagaggctgggcctgaggaagccagggaagcaggagggggtgtggggaggccagcaggggtgtgggcctcagcggggagggaggaggtgatgcagcatggaagatgagaagcccacaccagccacactaggcccccaggagattgtggacgccgtcgggagcattattcggtggaggggtgcggggcagaagccagatgagacagctgggaggtggcaggcaggtgagaatgtgagacagagggaggacagtgatttgagaactgtatcgtaggtgggataggagtccacatcccagccagcacctagaaggttgggctggctctgcccagggcctggcacgtggtgtgcactcaccagatggtcgccgccctgaaagaactcagcactgtgcctcttttcctgcctctggtgtttgctgtcaatatgcagagtgctggacaaaactgggccaagggagctgtcccactgcctgctgccctcaagcagagctgacctggcacatgcctctggcatacttcctgttggccctggcaccctgcaaagaggcccccagtgggcccaagcaggggataccacccgttccttgggctgttatgtagttgctggggcattgaggggatgaaaggtttttttgttttttgggttgtttttttttttgagacagagttttactctgggtgcctaggctggggtacaatggcatgatctcggctcactgcaacctccacctctcaggttcaagcaattctcctgcctccgcctcccaaatagctgggattacaggcgaccaccaccacacctggctacttcttgtatttttagtagagacagggtttcaccatgttggccaggctggtctcaaactccagacctcaggtccacctgccttggcctcccaaagtgctgggattacaggcgtgaaccatcgtgcctggccggatgaaaggtattgagtactaggggctaggagggaccaagagaaggaggaagagatttttcggttctacccatgaactaagcaagggaggcaggcctagcccttgcaccatggaagtgggagagaagtgatacaaaggtgtatctgatgtcacaggtgtcacaggcctgcttcttgtaaagggcctcctgcatggtgagttctgcgtggggctttgctgagtaacccccatccgggctctatccccttccctcatggccctgtgacttcctggcaccatgaccctctccccgcttctggctctgggaagctccaaacctctctcacctgcctgcccacctgcctgctaggtttccaaagctaaacagaggggcagctgtctgggcagggcaagggagccaacagcctgcctgggtttcctgtccaagtgtccagctttgcttcttcctcttagggcagcgtcaagaaggatcttaggaaagctgtgttgctctggggatgaggaggctggaacagcaacttaaaaaaagaaatagtccctggaagggagggaaggagaaggttcagaggcttgtcatttaggcaccccaacttctataccttaccaaggtgccaggcccagagggaagggggtagccagggcagctccccgacccgcacctgccttttcacccctctcctatttcacaagcatttaccatgcatcaacagatatgttcctcacagcacctttatcagcagggactgcccttttcatgctacaaacaggcccagagaggttgtcacttatacaaggttgcacagcatggtagagacacaggaaggactagagcccaggacttctaaccctagctccttctgcttccctcacatcatcagctccagacaacctgagattggagaggacagaaagtcaggatttcaacacctcgtactctgaaaactcagtggtggttctcaccctgtcagtggggcaggtggcctcacaccccaccacaggctaaacagggtgcatgggggacgtagccccactggccattctacacattcatgccaacagctaccaggcaccagcctcaccattgatttttggacagctggtctgtgccaagtgccattctagatgcgagtcccgactttggggtgcttgcattctgggaagggagatggtcagccagaaagccccaccataggagctaggttgggggtccccaaggtacaccaagaagctcaagtgacctggacctgggaggggtggccagaggcttctgctggaggaaccttaggtcagttacctaacctgtctcaacctcagtttcctcacctgtaaaatgggctagttgctgcctcacagggctttgctgaggatttgatgagtgcaagtgcttagcatggcacctggcacagagaaatatgcactcagtaaacttaagctgcccatatcattggttggccctcccaaccagagtgcaagccccgggagggcacagaccatacctgcttgttcaccgccatattttcagtgcctaggccagaagccagcacaaggtaaatgctcagaaaatattaacttaataagttcatgagaaaaggcccaggaaaattaggaagaggcaggactattccagttaggaatagactctcctatgccaggcacagtggctcacacctgtaatcccagcactttgggaggccgaggcaagcagatcacctgaggtcaggagttcgagaccaacttggccaacatggtgaaaccccatctctaccaaaaaatacaaaaattagctgggagtggtggcacacgcctgtaatcccagctactcaggaggctgaggcacgagaattacttgaacccaggaggcggagattgcagtgagctgagattgcaccactgcactccagcctgggttgcagagcaagactctgtctcaaaaaaaaaaaaaaaaagggaatagactcttctttctgcagctgtatttgctctagctgtaaacaactttgtagccaagtgcagtggcacacctatagtcccagctactccggaggctgaggagggaggattgcttgagcctaggagttggaggccagcctgggcaatatagcaagaccctgttagatattatctatttagataataataatgacctgtaatcccagtactttgggagaccaaggcaggtggatcatctgaggtcaggagttcaagaccagcctgggcaacatagtgaaaccccgtctctactaaaaatacaaaaattagctgggcgcagtgatgcatgcctataatcccagctactcgggaggctgaggcaggagaattgcttgaggcagaggttgcagtgagccaagattacgccattgcactccagcctggacgacagagcgagactccatctcaaaataataataataataatgatacatactatttcagtcgagggtcattttttcctttatccatctgttgttcaccaactgtgtatctcttgcctggcccaggattgagagataatgaggggcccagatgaactccctgtcctgcctgaagggatgttcagtattgaacaattgttgctttatggctttatgacaaagtcccaggtgctcatgataatctttgtacagtggtggggctgtagggagccctaacatagcctgggggaggctgcctagaaagtggagacctgaaggctgaggccatgttaaggatttaggtagaatttatgcgctatgatatttttttctttcgttaattttttataatttacgtatacacatggtaaaatgtgtaacaaggcacagtgttacatagcaaacataagcctcactccaccttctctctccacctacctgtccaccttctagatgcagccattgttaccaggccttgcgttttcctgcagccagagtccatttgtatcccgcatctatattttcttcccggcatttgtttctgaatgggagcttgctacatcggagtctctccaccttggatgatttgtcaccccccaccttcccaccccaggagacacttagcaatgtctggagatatttgatggttacagatgagcagtgggggccaggcgtggtggctcgtgcctataatcccagcactttgggaggccgaggcaggtggattgcttgcactcaggagttcaagaccaggctgggcaacatggcaagaccccatctctacaaaaaattttaaaaattagctgggtgtggtggtgtgcacttgtggtgactaagggggctgaggtgggaggatcaattgagcctgggaggttgaggctgcagtaaactatgatcgtgccactgcactccagcctgggcaacatagtgagaccctgtctcaaaaacaaacaaacaattattggcaattagtgggtagaggccaagactgctgtcaaacattctataattcacaggacagtccccacttacctggtggaaaatgtcaacagtgctgaggttgggaagccccgtcctgcataagcacagggtctgcacctttgtgtgtgtgtgtgtgtctgtgtgtgtgtgtgtgtgtgttctcatgtattttctggatcattcacatttatacatccacctcattattctttgtggccacataaaaatccattacctggatgctccaccattttcatttaggtgtttgcactctttttgctattataaacatttatgctacaaaggttattcttttccgtgcacaggcctttgatgtgtgaggtcaagggagaaactgatggaggtgggatggatgaacccgatggttcattagcattttaaatgacctattaaagagaccttcagtgtctctggggcacagtctgtctggagagtgggtctggggtcctggctgctaaccagggccgagatcctcaaaagtctggtggagagacatcctctgcattcctcgtgtacagacaagggtgttctgaccacctgtctctccgcaggacaagggtgtcccccacctgaagacggcaagctgggtcctgagtgatgcccctcagctgagtgtccaaggctggcccgaggagcccccacggccccacctttccccatggagaaaggactcactttgccccaggactgccgggactttgtgcacagcctgaagatgagaagcaaatacgcccttttcttggtttttgtggtgatagtttttgtcttcatcgaaaaggaaaataaaatcatatcaaggtgagggttgcaagcccaagtcttcatcttcctttcaaggtggggtgggtggggacagggaggtaactgcagggctctctgtggacctgcaaatgcattccttcaacgagccatccccaggccccttctatgtcccaggcagtggctcctgcacacgtcctcatgactgcacaggggtgagacttgggctctggactcaaacagcctgggttggagcccccccatgttggccctctacagctgtgaaaggttagacaagatacttaacatttctgagtcttcggttcctcttttgtaaaacatggctaataatgggaccagcattgttgtaaagattaaatgagaaaatgtaaaagcatttagcccactgcctggcacatagttggtgtccagtatttgctggctgtgactattactgttaatttacctcctggccttgcattagcagcacatcccctatagaagtcttgatgtcactgagcccatggaaaggcaaggtcctagtatggatactctgatgggcaaggctgccaatgtgcagctgccaagttgtgtactgctcaactccaggggcatgtccctcaaataggctaatctgggaacgcccctttacccctttgaattggcagcatacagctatgtgcagtgggcctgttagatgtagaaagatttcttagcctgttctcctcccaggcacaagccctgcaagaaagcattagctaagatgggtgggtcagggattgggcaatatagtggacaccgtcaatccccccccttgggtcactgagcaaggaccgttctagcttgtgcctattgggttctactgcaagcccctacagctctgcacctgagagctttctctccactggcacactggcaagccggaagtactagggagtaactgtcccccccagatccccatcagactaagcctccgatgcccacacctgctcctagcagcacatccatcatgcacctctttcctcccctgcctcacttccccatccagtacttcctgtgatcatgtcccaaataaacttacttaaacacaaatccttgcctcaacgtctgcttttggggaaacccaactgagacaggttttggtgatctgcttggaggactgcttagggttgcccaggagacggggtccccagtcagccactgaccctgatcttctttgtcctcacagggtctcagacaagctgaagcagattccccaagctctagcagatgccaacagcaccgacccagccctgatcttagctgagaacgcatctctcttgtccctgagcgagctcgattcagccttctcccagcttcagagccgtctccgcaacctcagcttgcagctgggcgtggagccagccatggaggccgcaggggaggaagaggaagagcagagaaaggaggaggagccgcccagaccggccgtggcggggccccggcgccacgtgctgctcatggccaccacgcgcaccggctcctcgttcgtgggcgagttcttcaaccagcagggcaacatcttctacctcttcgagccgctgtggcacatcgagcgcacagtgtccttcgagccggggggcgccaacgccgcgggctcggccctggtgtaccgcgacgtgctcaagcagctcttcctgtgcgacctgtacgtgctggagcacttcatcacgccgctgcccgaggaccacctgactcagttcatgttccgccggggctccagccgctccctgtgcgaggaccccgtctgtacgcccttcgtcaagaaggtcttcgagaagtaccactgcaagaaccgccgctgcggccccctcaacgtgacgctggccgcagaggcctgccgccgcaaggagcacatggccctcaaggcggtgcgcatccggcagctggagttcctgcagccgctggccgaggacccccgcctggacctgcgcgtcatccagctggtgcgcgacccccgggccgtgctggcctcgcgcatggtggccttcgccggcaagtataagacctggaagaagtggctggacgacgagggccaggacggcctgagggaagaggaggtgcagcggctgcggggcaactgcgagagcatccgcctgtccgcggagctggggctgcggcagcccgcctggctgcggggccgctacatgctggtgcgctacgaggacgtggcacgcgggccgctgcagaaggcccgcgagatgtaccgcttcgccggcatccccctgaccccgcaggtggaagactggatccaaaagaacacgcaggcggcccacgacggcagcggcatctactccacgcagaagaactcctcggagcagttcgagaagtggcgcttcagcatgcccttcaagctggcccaggtggtgcaggccgcctgcggccctgccatgcgcctcttcggctacaaactggcgcgggacgccgccgccctcaccaaccgctcagtcagcctgctggaggagaggggcaccttctgggtcacgtaggggggccggggccccgtatgcccctcctcgtgaaaggcctgccccgtctttctgccgcagccctcgcagagggcgggtgcacagcgccatgagcgggcagcgcctcctgtagcagtagggcccccagccagcgctccagccaaagcggcggccccagggttaattgcggagaacaggacagtgcccggtccccttgagggccatcacacccagacccaacgggttgcagcctcctgagcaggcctaggcaggcccgggcctgttggcaagcttcgatctcacacacacagaaacatacattcgtgcctggagaccctgcaggccagagtccaaatatttaacaatcagaaggggcaaggctctgaccagtgacagtcagacctcctgctttatttggtgttaaccgtttcttgtctggatggtgaagtctggaatctgggtgggtccttggaggaggggctaggacagccgtgggtgtcaaaggtggcatttgaggctcgtttgaggtgacagtggctgtttaccaactagtacagagcgattcagcgttttcatgaatgggttggctgtgctggttactgatgaatatgggccccttatagagctgcaaaacacacacatgcgtatagacatacatacatgtacaccatacatagacaagcatcataaaggcacaagtgcacacacatctatgcagacaagcttcctcgctgcttatgcccacagggtttttctgtatgacacacctcagaggagcctgtgcttaacatttgtaggattatttcgagggcagggcaggggaaagaaacgcgttaaagggccatgacatgacacagttccctggccgggtttggactgaacagtggattcagaactgcagcgttcaaagcccctgcccgccttagattctcatggctacctcctctgacccatccacatccttgcggctggcaggcaggatgttttgaaatggtgcagccaaaggccccgtctagcttggctggctcccgaacatgtccatatttgaaggctgcctcaggcctggcaggcagaagcagctgtggtccctggaggcaaaaggcagctcacggggccttccatttccagccaggcctcatctggggtagggccaagaggaaagtacagagtgcccgtgggggagaagtcccaccaggatgccccccctcccctgagaagcccgccttctccctcgtggacaggagtcagccagttggttgctgtggttacagccagtgcctggaattcctccttagggccctgggaagagtattgcttaacgcaggatgtgctgggtgttttgtttcgggcttttatttatggcttggtgtctttcttgtttcatggctgtgtttttgcttttgtttctgtaggagcgcctcttccaagcagtggaggcctgagggcttgagggaggctggggaaaaccagcagggagcacttggctcctggcagagggagaggacaggaggaggagccttccccaggaggaacgaggagaggtggccacgtggcaggccacagtgccctatgggcttttctgtttgaaccccatgtgggatgaatctcaaagccaccagcgttcttgcctagtgtccagagcagcagagatttgcagccctcgcccctccctgagaagaagctggatttgaaaatccctcacaggccctaacatgtttcctgggtgggcaggggcctcatgacaagcgacaagtgtacccagagtagaaggccttccccactcccacctcaaacccaggagcagaactcagtatccagagcttacaaggagctgcaagggtttgccgagggctgcccagctctgcttctggtttcctggacaatttctctgtcagatacggcccattgtaaacccagagggctgcattttgggttgagtaatatggacaccatggaagtacaggatctgagtccaacattgccatgggggagggaagagtgtgtcctggcaggaagccaccattggagaaggtgaggccagtaaccatctcatgggattcgctataatcagcctatttgagctgctgggtctctgtcactgtggactccagtcattcaaggaggtctccactcttgggttttttttattttcttttcttttgctattttgcctgaacaccccaacactcttggttttagagtccaagagtaagttgtgcagagacatggttctaatttggagttcaaaggaacaccagctctgaaaacatgaccgtggggccaggatgtttctggcaggcccagaagtgctggccgttcttccccagcctccccactgctccctcctctgttccccatgtggaggtcggaggggctgggactggggagggggcagccacctccatccaaggctcttcctaggggccctgctaatgtggacagtagactttatccctccttcttactctgggccaagacctcccactccgccctctgaggatggtaccaagaatgggcctttgggacttctcaggacattgacaatgtgcacactgcaggttgacttaatttatttattttttgaaaagaagagacagaaaataccttattatctgcagggactcaaagctgtacccaaatcaagaaagacaaaataacaatagaaaccattcacacactccgttcatgcatggacaccagaagacgattcagaacacaagaggagaatgagctggagcgccagcaccacgatggccccaggacgttgtttaagatctgagatcccttggtttctctcttgttgatctgagatgctacatcagggcccttgctgctgtattacctctgcccgggtgtttgagacaggtcacaagcgcgtggatgtttcctggaagtgtattcccctggggctcagcgatgctctgggaacccttggggtttggggaaggacagtgtggtgtgactattggcttgaaacgttatggatatggttggagtcacccatgtggatatgattttcagcttggagctgggatggagaagatggaagcactggtggccgggcctctttttccagcgaggccagccctggcttctcctctgttccagcttgtctgccagaagccttcccctgcaaggtgcccacctgcccggagacagagggagcagctgaggcctctctccactggccgccagcctccctagcacaaggggaccattcagcaatgagtgtttactcatgttctttcttgttgatgagttctgcggcccagcatatagaaatggctcagaacgttccaggccttggtgagacacagcagcgtccaatgctcacaggctgtccccactctgcctgttcccatcttcccctcgggacctgtttataaattgaggaatggatgagggccctggagggtccttgggagtagttagtggagggcaggattctcaggtccccatagagagggaaagagaagaccagatgtgcatagaagccagtctctgtcacatacaccgcaggtggtcaccgagttattttccaaaagctgaggaacataaagcaaatttaggcttttgtccttctgcaatacatgcacttgaaaataaacagaaaagagatgtttaataacaagtttacttccggtctgctagcaccctcagcctgggagctactgccagaggctggcgtagtggggcagctgctgaccaaaccccacagaacagagggcaccaggcatcacacgacatctttccctcccatctctgccatctgtctgtctggcaatggaaggagcttcagcaggaggtccttcccagaaggttgattcttggcctgggtggtagaggagatatcctgaccctaaagtcttccagccccgggtcatcctctcctatactagggcctattgaccgtagaggccaggtgcggtggctcatacctgtaatcccagcagttggggaggccaaggtgggaggattgcttgagcccaagagttggagaccagcctgggcaacatggtgagaccaattgactgtagggcttgtcccttgctaagacaggagcagaagactggatggctgtgtcctcaaggcagtcccctcccatccccattcccaaagtcagaaagtgaagccagatctcaagggctgatacctgaggcaaggagagctaaggggagagaaattggggctgagtggaagcagatgcctgcacaagccaagtgtgtcttattgatctgtacaagctgatagaaggaccatctgctgaaatccagggctcctgagttggtgggtttgcttgtgaagcttctaggacaaggcgcagccagatggaagggagagggtccagggcttcctaaatgcagccgcatcacctgtcaactcgctgcagtttcagagacagtggaagctgctctttacctcaaaagcacaaagcagaattggcaacttcacttgtctcaagagctccaagatcctttggtctcgtgtcctttggcaccccgtaactggactggggacaaatttgttacgtgtttccaaggctacagacatggcgccatcctcacaggcctagctcatgtcatggatcaggtgctttgctggggggatacaatgacccatgtggtctgcgtcttctgccattggcttgaactgggcaccccctgaagtctccatctcagctgtatattctagtccaaattttcctggctcccctgctccctcccaggtcctgcacactgtctttttgccaacacctcagccctgtttgctatttcatgtctgcatggtacgagacaccccttcacggcatacactgccatggtatgtacatatgcatccacgtgtgtgtatgtgtagcatgtagctcattctgctcagcctctggcgccgttccacattgctcccagccccattgctgtcactgtcgtcccagatgtccttgccatggccacagacaatctgccgtctcctggaaacgctggggctgcccttcagagagctggcagccccagcagtcagggcctgctttgcagaatagaatgtgaacccaactcctgatggcctacttgacttatttaattaaagatgaaatcatgcaatgagcaaaacctgcagcgtgtctctgccttttcctttgcatttgttctcagcagcaattgggtcataatttttttttttttttaattaacagtggtagaaaggaggtgacttccagcatgaagcaggacagagaatccccctgcccattcccaagggaccaaaggcactaggggaatatggggcaggatgaatgtaccttgcgtcaccaggctggcagagctgatggggactgcgctgagcggagagagagaaaacccaggtatttgggggcagagacaggagtgttgggccagcggtcagggggcctggggatgagtcccagctttgccactgtctggctgtgtgaccttgcataagtcacttcccttacttggacaccagtttccttttagaatgaaggtgtaatcagttgttcacaaacattgttcccaaaaagccccattagggattcaaaagtcagctgaaagggcaggcggcaccctctcaacaagagtcactgtgcgttttgatctgcttcacgtgttcagatagcatttcagatttatttggccttcaactaaatctccaaaaacacataagaaggttgccaaggaccctttcagctaagaaattgaatggagtcctttcaaattgcagttacatccgtcataacaactttagttcttactacatttcagccctgcttgtctcccaagagctgcctgcagagcatgggtgtttccctggggagaagggagagagctcattttggaacacagaagccagagctggtggggctttgtgggtctcaggacacaggggtagcaggaccagcagctgcaggaagaggcagaggagggctgagcacggggacagtggctcctggagtgagggaatgaagactcagagaggctcaatgtgagggaacaggcccccctccccaaatcttaacctgtgtctctgccagttcacccagtccaggcttgggaagctcaagccagctccctcccacctcttaaagtatttgagccggtgcctgtcatcccaacctgaacagaagctgcccaccccagtcaggtgctattgctgtctcccctacgctgggggctggatatagttagtttaatttctgggctgtgtttcctaccacaaatgaccccctggggaaacaaattgcactaatcacagagcagagaagcctggacacctccccacccacccacccctcagctgccaggccggaaccgtctctcctcctcctcctttcccccacccccagaccccttcaggatcgtcagtcttccttcctacaccccaatttactcaaccctggggaggagtcaagcgccccgtgggctctctgggacagggagagttggctgggactctctggaaagcagtttgatcagcagggggctggggtcagggacctgtgccattgcccacagagccctgccaggcccagcactggcccagccctggagcctgcagcagcatcctcaagtgtgtttggagaaactgtggtcacaggattgctcttgggaagttacagtgcacatttgcgattacaggctccaggtaggccgctttcctttgactcacccagcattaaggattaccttctagaaagaaccatttttatggaattcgtttatcatgaaaaacttttttccaaacaacagtctttttcaagactctggccttctttattttttaagactctgtcacccaggtgggagtgcaatgacgcaatcacagctcactgcagcctggacctctcaggctcaagcagtcctcctgcctcagcctcccaagtagctgggactataggcatgcaccacacttgctagcttttttgtattttttgtagtaatgggatctcgccatgttgcctaggctggtcttgaactccgaactcaagcaatctgccggcctcagcctaccaaagtgttgggattataggcatgagacactatacctagccaagactctgtcattctgcaaaagagttagtagctaccagcagcctgcagctggaagtgtgtaggaccaaaagccaccctaagcagccattaggtggtgggtgagttggctgggagaaaaaatctagggttgggtttaaggcccatcccccttcacaccatcctccccgagctgccaggctaagaggagccctcagagattgcagcagcctcaggggcactgagagccagggttcggggcactgagggccagggttcaaggccctgagacttgctgtccccaaacctccctggttcttggcttcctcaactcaacccacgctgtggggcctccgtggcatgacccaaaagatgtggaacaccccacagagagtgggaactctggagaaccaggccaggtataaacaccacgggatactatttatctgagaaataggagtttgagattgctcttaaaggagccatttctgaaacagtgggacaaaggttaccagcagtaaataggtttcctggaggtgtaatcctctagtagctagtaaaaccttcgctgaaatctgcgggccgtttattggaagaagaagcaggtagtaagtgcccagcaggagaggcccgcccaagaaaattagaagggggaaaaagaaggaagggagggagggggaaggaaggagagggaagagaagaggaaagaaggaaaaaagggaggaagaggctgggcgcggtggctcacacctataattccagcactttgggaggctgagatgggaggattgcttgcggctaggagttcgagaacagcctggtcaacatggcaagatcccacctcttaaaaagaagaaaaagaaagaggaaggaagggtggggaaggttgggaaaggaagggagagaggaagggagggagggtgacagtgggatgcatttcatgccaatgcagaggaggaagacagccaagttgttgaaaagaacacccttggggatagccacagccacagtgcccaagagtttagagggtcaggccaagcccaggtacactcagtcctgtacacctttggccatggggctaatttgccccatggatatgtggctcacaccatgtttgtttctgtttttaacaatcggcaggccagcacggtggctcacacctataacccccagcaccctgggaggccaaggcaggtggatcacttgaatccaggagtgtgagaccagcctgggcaacacggtgaaaccctgtctctacagatacaaaacaaaatattcaccgagtgtggtggtgcgcacctgtagtcctagctactcgggaggctgaggtgggaggattgcctaagcccaggaggttgaggctgcagtgagctgtgatcacatcactgcactctagcctgggtgacaaagtgagactctgtctcaaaaacaaacagttggcattcaaggacaacactaaaaactgaaggggttttatataaaaggcagacttggctcctcttgaaaatcaggtgtcttggtttgggttacaccggcagctgacactgggacaagggcaaaatggtttctttaggagctgtggatggtccggcaagggaggagaggaggcaggcagccagcagaaccgtgccgctgagccagctgccactttggggaactggagccgaatccctctgggaaccacagtgcaaagccggtgccttggactcactccaccccggggtgaggagagggagtctgaaggttcctacaccagtgcctgtcagcttctggctgagactgctcttggagggtattaatttcacagcacagccgctggccccagcagaacagcattcccaaactctggaacaaaccattagactcagaggtaaagatacaggtggctagaagtttccagagcacagtaaaaggttaggtgtaggggatagggcacggtctgacaacatctacgccctggggtgctctcattcccacaggaaaaataggctctggtgggagggggcagcagcctttttaaccggagaaggtcagggtccccacctgcccatcccccggtctccccaattactgaggcagcaatgccctttgccatgtatcatagcacttgcactgatgtttgacttccaacacaatatcttctctgtgaattcatgtctgtccaacatgagaaagtgtcaggccaagagggccacggctcccaagccattcactgtgacagctccccagccactacgggtatttgggtttgcagccctggcttaaagtcctggaatgctaagggctgggctggctttcctgacaacattcactctaggcttctttttttttgagacagagtcttgctctgtcgccaggctggagtgcagtgctatctcggctcactgcaagctccgcctcctgggttcatgccattctcctgcctcagcctccccagtagctgtgtctctactaaaaaaaaaacaaatacactctaggcttcttaatgcttagacctcaggaatgaggtggttgctctccctggtctgcacaccatggaactcaacaccccctggccatctctcacggcacctacctagacttctcccgcccacctaagcagatggccagaataaacactgaagaagaggacagctggttttgcccacctggaggtgaacagggctaggcctgcatccagtccacgccagagctgccccctggaatgttttcaactcatttctgcctcggtgcacacagtggggcatgctcctctgtggggcacacagaccccttgggcacgcgctcactgtgatcagcatggcagttcccagtgcctgggctcaaatgcttctccattctctcccacacaagaaagctcaacagagtgacagaggacactgtgtgtgcaaagacctggaggataaaggggacatgggaagtttggagaccaagaagcagtttgctctggccgagatggtgatgagacaggaagctggagaggaaaactggggcccgaatgtactaagaaaaagaggtctgacttgctcctaagagctatagagagccattgaaaggcagagtgaagcagagtggtttggtctgatcaactgtattctattttacagagagaagagtgaggcacggagagctgaaatgaccagcagcgtcagaacatgaacccacgccactcatccttggattccaagcctagatcctcctgtcctatcctttgcctcacacctcccacccaatgtattaagaccccatgggctgtgtgctatggtttgaatgtcccccaagattcatgtgttgaaacttcatcaccagtgtgatagtatcaagaagtgagatgtttagaaagtaaatcatgaggagagagccttcaagaatggaattagcagctgggtgcggtggctcacacctgtaatcccagcactttgggaggctgaggtgggcagatcatgaggtcaggagtttgagaccagcctggcccacatggtgaaaccccatctctactaaaaatacaaaaattagtcaggcatggtggtgggcccctgtaatcccagctgctcgggaggctgaggcaggagaatcgcttgagcctgagaggcggaggttgcagtgagccgagatcgcaccattgcacgtcagcctgggagacagagtgactctgtctcaaaaaaaaaaaaaaaaaaagagtggaattagcaaccttatgaaagggctggaggaaactagtaatcactcctttttgccctctgccatgtgacagcacagcactcgtcgtttccagaagaatccagagtaagacaggaagcagagaacatccctcaccagacaccaaacctgcagcacctggatcttggacatccagcctccagaacttgagagataaatttctattgcttagaacttgcccagtctgtggtattttagtatattaagttggtgcaaaagtcatgggttttttgccattactttaacgtaaaaaactgcaatttttttgcaccaacctaatagcaacacaattggatgaagacactgtgtacatgctatgaaacccaagccagaatcacaggcttctctctggagtcatacagggcaagccccagctctctcttgggtgctaactttccaaagtctgcccctgagtctgctcttctccacgcttgaatagcaacaatgtgtcctagctgtgggaccttggaccagtgacttgccctctctgagcctcagctagctcatgtgtagaatgggggataatatcgacgggaagggtagggtgctgtatggcgcatgcctgatttgcagtgagcctgaatcaacaaatactttgaagtctggaatggaggcccaagtggagcttatcatgcaacctagggccacatagaatgagtccctcggcatctgccccaggcaggcaggctgtaaacctggacaaatactgaaaggacaaatactgcaggacaatactgaaaaccagaattgaggttccagggaccaactctgagacaccccatggagcaattcccagagtttgaacaagtgagcaggggagagttttctcgttccttttgggagtgttcattcattccacttctgtatttttttaacattctctttcccctgacttgaggttgatttatttaagcagtttcccttccaagaaaaaatgccctctgcctctgtctctatcagtggagagaccgacacttagaaccaagaagaccctggtttaaatcagttcactcaagacattggctgatgggcagtgcttctccctccagccctggctcttgaggggtctggccagcccaaatagtggcatgttcacacttggcctgacccaccacttcctgacacatgtcctattcggctggggagcagggaaacagttgagaagacatgtatcaagacttgctcatggaagcaggaatccaagatgcccattacaggggaatgctcctgacatcttacttctagacgccagtgcctttctctttctctttgaggggtgtttaagcctcggtccctgacctcagcattcacatagcctgccactgtgcctgacccagcaagatcagtggttgaatgaattaattaattaatggtgataaagttctagaagcatttggaataagaacttttttttttggagacagggtctcactctgttgcccaggctggagtacagtggcatgatcatggctcactgcagcctcagcctcccaggctcaagcccacatcagcctcctgggtagctaagactacaggtgcacaccaccacagccagctaattttaatttttttgtattttttgtagagaaagggttttgccatgttgcccaggctggtctcaaactcctgggcttaagtgatcctcctgccttgggttcccaaagttctgggattacagccatgagccaccacacccagccatgtctttttaaatacacagtggtgcactgtctttgcaaatgtcagtgtttgtatgacatggaagacaagagtgtggaatctggagccaatctgcctggtctcaagtcctggctctgcccatttcatggctgtgtggcctagggcaaagtacccagcctgtctttgctgcagtttcctcatctgtgaaatggggataaagctggtatctacctcatgaggttgttgtaagtattaagttaatgcatgaaaattggcgcatagtaagcgctcagaaatgattactgctatgctaagagcctggccggaggtagaagagggtaaaacaggaagttctaatggtttttctttcaagaaattgttactgaaaccacaggggttcgggctaggtcctgctgcttacaacacagaaagccaatcactaagacaatgaggattgccggggaagaaggcttcaactgggtaccgcatccaaggagatcagtcccaactctgtctccctgaccaattaaacttaggggtttatatagcaaggaagaaatgtaactacatctaggaaaacaggaattagggaggggtaaggaagaggagttggtcaacaacaggcaggcgttggcttaggaaatcatgaagggtgagaggtctggcatctcattgtccagatccagtgagtttcaatcagggaggcctgatggttggtttcctgagaaatgaactcagataagacaaatgtaactttgccaagtttcaagactgggaggtttcatttcaatatttattccaaagtagccataaatgtcagttctatgggataattgggtctgtttcaaaaatgacaagattgcagctggacacagtggctcacgcctgtaatctcggctctttgggaggccaaagcagacagatcacctgaggtcaggagttcaagaccagcccggccaacatggcgaaaccccttctctactaaaaatcacaaaaattagctgggcatggtggcaggtgcctgtaatcccagctacttgggaggctgaggcagggagaattgcttgaacccaggagacggaggttgcagtgagccgagatggcaccactgcactccagcctgggggacagagtgagactctgtctcaaaataaaaaaaaaataaaataaaataaaagaacttggcttttgatgccagtgatgctgtgcaaaggcagggaaacaccacatgaagagctcctagacaaagtctcctgttccattctagatgcaagcccaaaataaacacaggaataaagctcagacccagtggagatcaaagaaaggcaaacccaaataacagtgacctcttacactggcaatattttttttttaaaaaatagcaaaacctggctgggcgaagtggctcacgtctgtaatcccagcactttgggagccaagatcatgccactgcactccagcctgagcaacagagtgagactccgtctcaaaaacaaacaaaaaaaaagcaaaacccagtgctggtgaaggtgtggggaaacattcattcttttgatgggagacttctgaagggcagtttggtgacgtgtatcaaacatcttaacatgtttcctaccctttcatccagcaaatccagttacaggaatttattttattttatttttgagacagggtctcgctgtgtcacccaggctggagtccagtggggcgatctcagctcactgcaccctctgcttcctgggttcaagctattctcctgcctcagcctcccgaataggtgggactacaggcacatgccaccacgccctgctaatttttgtattttgtttgtttgtttgtttgtttgtttgttttggtagagacagagttttactgtgttggccaggctggtctctaactcctggcctcaagtgatccacccacctcggcctcccaaagtgctgggattacaggcgtgagccaccgcacctggcccagttacaggaacttatcctaaggaattaactgtggctgaatgctaatatttaatgttattaaacattaaatgttgtttataatagtaaaaaactggaaaaccactcaattgctgaatgacagggggctggttacatcagtatggttacacatatgatggattctctgcagccattaaaatgatcatgcaggttttttcatgacaaaaatgtttaggatacattagatgacaaaagtgggctgtaaaacaacaagcgccatatgacctcatttttgtgaaatgaagtattatctctaatatgaatatatctgcacagataaatgattggaaagatagaaaccaaagtgttgacggccgggcgcagtggctcacgcctgtaatcccagcactttgggaggccgaggcggtcggatcacgaggtcaggagatcgagaccatcccggctaacactgtgaaaccccgtctctactaaaaataaaaataaataaaaataaataaaaatttgccaggcatggtggcgggcacctgtagtcccagctactcgggagactgaggcaggagaatggggtgaacctgggaggctgagcttgcagtgagccaagatggcgccactgcactccagcctgggggacagagcgagactccgtctcaaaaaaaaaaaaaatgtagattaaacacaactaaaaagaaaacaataaatctaaaagagagagctgaataaattatcatggcataaactacccagaatgcagcagagagagataaaaacatgaaatgctagttaaaacacaaagacaaggccgggcgcggtggctcacgcctgtaatcccagcactttgggaggccgaggcaggcagatcacgaggtcaggagatcgagaccatcctggctaacacggtgaaactccgtctctactaaaaatacaaaaaaaaaaaaaaatagccaggcgtggtggtgggtgcctgtagtcccagctactcaggaggctgaggcaggagaatggcgtgaacctgggaggcggagcttgcagtgagccgagatggcgccactgcactccagcctgggtgacagagcgaggttctgtctcaaaaaaaaaaaaaaaagaaagaaaccaaagtgttgacagtagatggtgagtattttatggttttccctctctttatctgaattgttaacaatttctttaacaaacacgtattccttgtgtcatcacatagcagttaagagcttgggcttcagagttaggctgcctgagttcaaatcccaattccatcatgggttagctgagacctctctgagccgcagtcttcaggtacaagatggagagaataataataaagccaagacgctggctgggtgggtgttggaaggctctaagtgagatgatacaacccgtgtgctccccctggcacagtaccccacagttatccattactgttactgttatcaccatgactaattactgttataattattaatataacctttgcaattaggaaggtgagaagccttggcctctgcccatatcctctggccacccagagtccccgagagctgtccccaccagctcttccctgccaggttggcgctcgctctcagacttactgtgaggccttcagcccacacttgccagaactcccgtgttttctcctccgtgcccttttctgcagagaaggcttggaagaaacagcccagcaaacaccagtctcctggccccagagcgagacgtggaagtttgcagaaatgcatcaccaaatgtttgatttgggaggagaggaagagcagagctcataccgagagcaaaataggacagaaaggagatttttcagtaagggctgaggagagaccatcgttcatcactggggcctccttgtttcctcacttagtttcttgacttcagtcctgaccacctcatttgctgtggaacatctggccccaatatggggctgatttaataaatccaagacatcttcctttgcccagcagacttagaagaagccaaggagaaaccctgtggggttgccagcaaggacccatagaggcaaagagacagacaggaaagaggaggatggtgaataaccaagtgggaaccggggcgcatctggcaggtgagctgagacccatgtgttcagaaatcaagattatgggccagacagaggcatgcccattgaagccagcagcagcctccagaagcgaccacctgcccttggtttctatcctttcctgttgttcctcactaggcaggaactggctttatgtaggtcacagattttccagatatgggagaacaggatttgggacaccttgtagttgttacacacacacgcgcacgcgcgcacacatacacacgccccctcctcccagactggagggcagaagggtcatggagcttcagctagagtccctcctcctgttggtctggcctgtagggatactgtagcccctctgcctgcggatgtctcatgaccccagacaaagcagagtgactgtggctgacgagcatgtcggaagggctgacgggagcatcaggttgaaaatgagagaaagaagtgcatgaaagaagttgtgattcctagaagttcccactccacccacttcccacaacaactccactactccaaatgagaaattaattccttcaggatcagggttgcgaaggaggtgccaaaacctaagaaaaaggctttgtgtttgcagggtgtgaacttggtttaagagaagctagccatgacgcagctatgggacggggtcctggacgtctcagcatttcaggagagttagcaaggctgccctgcgcgggggtggggtggatctcttctgttactggtgttggagatagaacagtggtcagggacattaattgtggcgatcgattttccttattctcacttatgtatgtagaagagattcaatgaatggtaaagtcattatacccattcccctacagggagtagagagagaccagctttcctcattctgaactctggccctctacagggaagaaagagtccccaaactcaatactaaacaaacccagtggttttcagcaccggacacaagttaaaatctcccactagttctcacactttcctgggtatgcgacgccctgctcctgaaggccttgttaaaacacagatctctggaccccaccctaacagctttggattctgttgtcagggtggggcctgagagtttgcactttaacaggtgccctggtgatgctgatgctgctggtccccgggtccaactttgagaaccaccaccccacccccggtcctcagagactgatttggttggtttggagtggggtttctttggcagctgttgtttaaaagcacccagggtatcccagaagagccatggttcacaccatcaaggccagttatggagaatcttctacgagagcacattataaaaataagcactttcagcaggacgtggactctaaaaaaaataaataacataaaagtagaaataagcagaaacatccagctctcagttaagtacttgctaagctccagctgcttcaacctcatctaattcctgttccctttccacatcctggtcttagcccctctgcagctttgcaggagccgtctccacgtggcctggcctggctgagctctggggcaggagcgcttggtggcatctcttggctctgagtctacagtttccttgacatcttattgctctgattttctctcaagtgcctccccttctttcctttgttctgggagaaacattccctcatcttgtctatgtgcagagatccccaatgacttgccttccttacgactgagcagatagaaagcgacttgccttggtctgtggaatagccgatatcctatgacccttatccctccgcctggcgagacccacatggacataaatcacaaggatgccaaggcaagactgtggaccctgcctccagccgaggcctggcagaggggagctgtgggcttccagccccctgtgggaagatttaccaaacaaagagcagatgcttcaaacaatgacttcattgcagactgggtcccagtacattcaggaagggagtggcccatggatgctggccaatcctactcagaggagcctcaaagagaaaccaagcaggcaagccagtgaccaagcagccacggtgaggactggggaggaagacatgcacatctcacctctcctgggccaggcaattataggcaatatcctaattaatccttatgacggccaggcgcagtggctcacgcctgtaatcccagcactttgggagtccaagatgggcagatcaggaggtcaggagttcgagaccagtctggtcaacatggtgaaaccccgtctctactaaaaatataaaacttagccaggcatggtggcaagtgcctgtaaggagaattgcttgaacctgggaggcagaggttgcagtgagctgagatcgtgccactgcactccagcctgggcaacagagcaagatcccatcgcaaaaaaaaaaaattaaaattaaaaaaaattaatccttatgatgccacagtagaccttgatctggaagatgtgactgctgacctatcctgcctccttgggtctgatacaaacaagccgagtgggaactggcaaaagggcacgggtaagcactcatgtatgtgcatacaggtgtgtgtgtgcctgtgtgcatgtgtgtgttgattcctacccctcagtcttcccagccccagcgcacacagattccatcttcattttcttaaatcttcgtctttgcccataacctcccccatggagcctcccagcctaattgaaaaaaacaaaaaaagagagagagagagagaaatgttgaactgttatatgattccccttatctcaaatgggaggaaaatcgctggaaagttttaaagtctaggtgtcaatagtcctgtgagtcattttacgactgggttcgggcagccccgcagccaagccctcttgcctctctgaatctgttttaccatctataaaatgcagtcaagggaggtggggagggcttccagtcaggttagtttcacatccatgctttgaggccctgtggtcccagaaacagcaataaacgggcaaaacattaaaagggaaaatttatttttttaatttttttaacgtatgttttttgagacagagtctgactctgtggcccaggctggagtgcagcggtgtgatctcggctcactgcaacctctgcctctaaaagggaaaatttaaaagcaccccgtctatcagaaaataaaagacacagtcacactcaaaatcattttagacctatttgtggtacaaaaatggaccgaaaccccaatgctgtaaggtgccagagacctgacctcttggggctctgggtcagcgtcagctgtctaggttgggtgcggtggctcatgcctgtaatcccagcactttgggaggctaaggtggcaggatcacttgagcccaggaggtggaggctgcagtgagtcatgattgtatcatctcactccagcctggacgacaaagcgagaacctgtctcaaaaaaaaaaaaaaaaagaagaagaaaaagaaaggtgtttctttattgtcttatcgtctttcctggcatctcttacagctaggtgtacctatgtgactaatgtccaaccaatggaaagtaagtggaagcgttaggtgcgatttcataaagggagagtggtactcttttttgcttcttccacctcatgacagctcaaatgcagacataatggcaagactcaagccgccatattggagtgtggggtaaaagccactcactgaggacagcagaactggatagacgtctcctgagtccttgataattatggaggcaccacgctagccttggacagcctatctctggaatgtgtgtgaagtttgtgtttcataatgttgctgtaattttgggtgctctattactcaagagtgaatctaatcctcgctaaatcagaggtgtcacacgtcgtgccactactcattaatttggggcattagatttactttcaaattgttgttattctaaatagcataacatgaacctctttatgtaaaaaactcaatctgcatctctggggtttttttttctcgtactctattatcttcctaggatacatttctgttaacagaattttagcatcaaagaatatctaggctgggtgtggtggctcacgcctgtgatcccagcactttgggaggccaaggcgggtggatcacctgaagtcaggagttcgagaccagcatggccaacatggtgaaaccccgtctctactaataatacaaaaattagcccggtgtgatggtaaatgcctgtaatcccagctacttgggaagctgagacatgagaatcacttaaacccaggaggcagaggctgcaatgagccgagatcgcgccactgcactccaccctgggcgacacagtgagactctgtctcaaaacaacaacaacaaaaatctacattttagtatctctcaattcatgctgccaactaatgttctttttgttgttgtttttgtttttaaaaaataatagacatggggtctccctatgttgcccaggctggtctctaactcctgggctcaagcagtcctcccacctgaacctcccaaagtactgagattacaggcctgagccactatcccagcctaccaaccaatgttctgaaatggttgtacaaatgacattcctgccagttgcatatttgaatgcctatttcacagttcctgcactagtacaggaggcaagggagtatacgctttctgtcccccagccatgccctttgaaccactctggacttgagctgcagctgggcagtctctcctgtccccactcacagcttccccctctcaggtgccagtaacatctcccaatttcctgaccccagactttctccaaagctccagaagcttactcagctctcatgcaggtgaagtgtggcaaggagttagtgccccaaggagacgagagatgctgaaacacacctgggtgttttttatttgtttgtattggtttttttcccttttattttcaattgacatataataattgtatatatttatgggatacagagtggtgttttgataagtgttggttttggtagtgatttataaaagaggaataactgagtcaactggagctatttttgaggatagaggtgaggaccagataataacaaaataacaatagcaattatttgtttaacacctactctgtaccagatactgtttcgctgttgacgtaaaacaatcttggccaggcgtggtggctcacgtctgtaatcccagcactttgggaggctgaggtgggcggatcacctaaggtcaggagttcagcctggccaacatggtgaaaccccgtctctactaaaatacaaaaattagcccaacctggtggtgctcacctgtaatcccagctactcgggaggctgaggcaggagaatcacttgaacccgggaggcagaggttgcagtgagccgagattgcgtcattgtattccagcctgtgcaacagagcgggactccttctcaaaaaaagcaaaacaaaacagaaactaaacaaaaataaaacaatctctcagcaactctgcaaactagattattttattattcccactttgcagatgaggaaaccagggcttggaggtgtaaagtaacttgctcaaggtcttgaagttatgaggctgaagcaatacggcttgaacaaagactgagccccacctcgtctgaggtggcggaatatgaggaacatggtcttaggagggaggaaagagtggatgatccgaaatgaatcccagtttcccctacaaaatatgagggtcatgtgcagggaaccctgaccagtcctcctgtgagtgtgtgtgtgtgtgtgtgtgtgtgtgtgtgtgtgtattaggatggatgggacaaagtgatacattacaaaaagccgggagaaggagcttggtccaatgctaaccggcgccatgggagtgaggctcctatcttcctacagagagtgggagcaggggccctatcttcggggcttggctggaacaaacagttctggcggcagccttgtgtttgttctctcgggcaggcagcttaaggggaggcagggtcatcctggactgcggccttgagctgttgcaaacactgcctcacctcccgcctcaccccacgcagtgctggaactctgggcagggggacaatggtgggtctgtgagggtgtcaggttgtcaggaacaaggctggtggctttgagcaagttgtgcaaccccttccagccccaggtactcatccttccagtggaggatgtcacggctgccttcacaggagatggaaagatcagcccctctcccagcttcttgtggttcatttgcctgactctcctgagcctccgctcaactcctccccatttccttcttctcccagtttttttgtttttgttttttttgttttgggggttttttgtgatggagtctcactctgtcgcccaggctgaagtgtagtggcgcaatctcggctcattgcagcctccgcctcccgagttcaagcaattctcgggcgtcagcctcccaagcagctggaaatagaggtgcccaccaccacacctggctaactttttttttaatctgaaaagccagtaaaaatgctgagaggtccctctgctaccaaggtatgtgggcacgtggaaggggtcagctgccttgtccagatgctgaggggctggtagagagaaacatcagcagatgggagggctgctactgtcccacagagaagggccagcttgaagccatgggcttagggacccaatgtttgggctgactgttgttaagaacacagttttgacgttcccctgagctgagttcccgtcccggctcacagtgcttccctggctgggcaacctggggcttgtgattgtccctttcacagcctcagttttctcagccctgaacgttgtgaatgttgtgagatttgaatgagataatgcagacagagcttaaaaagaggccggatgcagcagctcgcacctgtaatcccagcactttgggaggccgaggcaggaggatcatttgaggacaggagctggagactaacctgggcaacctagcgagatcccatttctatggaaaatttaaaaattagcccggcgtggtggcatatgcctgtagtcccagctacttaggaggctgaatcgggaggatcacttgagcccagaacatcgaggctgcagtgagctgagatgtagccactgcactccagcctgggcaacagagtggtaccttgactccaaaaaaaggcggacaggagggcttagaaaagagcttggcatgtagaaagccctccaaatgttaatttataattatggcagggatgaatttcaaaatcataaagtgctcacagacaacaagctgccttgtccacagagatggctgcaattcctctggaatactgggggagggtgaacagtgatgactaaatccccctcctctcaggccccaggactccagggcagcactcttcttagccctgggtgtgtgggggggtaaagcatgggaccctccttccagtccccactgccagcctccctggccccccaacaccctgtcctgctctgtgccaggaggctgctcacaacccccggagcaccttattcctgtgactgggccgaaagacgaggctgggcgcaagcccggagcccagtgatgtgtcacacgtgaatctgtcacatgtgaagacacagaaacagccccttggctgttactaaagggaaaagaggccagcaaggtgactcacacctgtaattccagtgtcagaggcatgtgaaccagagcagctccatcttgaatagaagctgggtaaaatgaggctgaaacccactgggctgcatttccggatagttaagacattctaagtcacaggatgagacaggaggtcagcacaaaatgctggtcataaagacctagctgatgaaacagcttgcagtaaagaagccactaaatcctaccaaaaccaagatggtgacgagagtgacctctggtcatcctcactgctacactcccaccagcgccatgacagtttacagatgccatggcaacatcaggaagttaccctatatggtctaaaaaggggaggcatgaataatccaccccttttttttttagcatatcatcaataaataaccataaaaatgggcaaacagcagttctcagggctgctctgtctatggagtagccattcttttattcctttactttcttaataaacctgctttcactgcaccgcagacttgccctgaattctttcttgcacgagatccaagaaccctctcttgggacatggggtggggacccctttcctgtaacattggcactttgggaggtcaaagtagaaggatagttggagcccaggagtttgagaccagccctagcaacatagcaagaccccatttctacaaagaaattaaaaaatgtattagctgggagtggtggcatgaacctgtagtcccaggtacccaggaggctgaggcaggaggatcgcttgagcccagaagggcgaggatgcagtgatctgtgatcgtgccactgcactccagcctggatgacagacctgtctcaaaaaaataataataaaaagaaaaaggaaagaaaagaaatgctccttttccaaacctttcccctgaagagagcctagccttagactctggcccgttccctcccaggcactccagactcttgtgtcatgggatgacccccccccccacacacacacacaccagccctgtgtctctccctgggtgcttttcatccccgtattaattctccaacctttgttggtgaatcctccccactccccgcatatgatctctcacatggggctttaactgattttaaaaaataacatgaacaaacagtgaaactaaaagcacagctatgttgaagcctggtcctctaacctagtttcaaataataataatgataatgataaatacagctattatttattgtgctttgttggaaggacattagacaataattcaacattcacaaaaatcctggggtaggtatcatgatcacctgcattttacagataggaaactgagtcatggagacattaagccacttgcccaagatcacacagatcaagggaagattgtataaagccccttcccacaccagctgccgcttcccgactgcagaggctcagggtgctctctctgtcctcagaggcttgtgtaaccatctctgtgccccgttgcccggcctggacattcttgctttcaggcgtgggcacagggatccctccagttggccacaggcaggagcattctgagtgaaatgccaagcctgacttagaaaactctgccccagacagcagcccgatcatccgccactggtcgccttcctgtgtttattctgaggccaccatgcctgacaaaggccccttgtcctgtccaagaaggggacagatttttaaggacatggattgaggatatgggctatttattaccaggactggttccctctcccggaggcgtaggagttgctgtcacggtctgtgtggaagtcgatgctggccttgccgccccctcccctgcttgctggcccagctccctgcccacactcagatccacctgacagtttcctccacacacacatgcacgtgtgcacagcttgccagggtgcagggcaaagcgaaagggtatctcctgagtctataatggcctataggattcctgcacacctaaagtcatttgcaaagtggtggtgcatgtggacatgtgtgtgtcagtgtcgcatatgcaggacagactacagaagttgcagggcccggggcaaaatgaaaatgtggcaccccttgtacaaaagcattaagcatttcatgatggcaacagcagagcattaaaccaaaaatggggcttttgtgaatttggggtcctgtgcaactgcccaggccatatgcccaggaagcaggccctgcacacacatgttgtgtttacaccaaggcacttttctggttaaagggctccaggcttccattagaatctcaaagggtggcagcacagtggctaacacccataatctcagccctctgggaggctgaggtgggcggatcacttgaggtcaggagtttgagaccagcctggccaacatgacaagaccccatctcttctaaaaatacaaaaattagccctgtgtggtggcacatgcctgtaaacccagctactccagagctgtactcttgtgcctcagaatcacttgagccggggaggcagaggttgcagtgagctgtgatcgcaccactgcactccgcctgggtaacatagtgagactctgtctcaaaaaaaaaaaaaaatctcatagaggtccaggatactccaaaggttataaaccatttagtagcagaaggtcagtgtcagacaggcctgggtttgagtcccaggcacgttacttatcccctgcaggactggactaagttctgtgcccttccgagcctgtttcctggtctgtagaagggggattgtcataacactgacctcccagtgcaggagagatgggagccagctcgatacagtatgtggcatgtttcaagctcccagtcagtggttggttagttaacctttagttaggtctgttctgcttgttattgtgtgatgtcacctagaagtttctaaatcctcctgccagtttaacctcagctagctgtgccttccgtggatgtccccagcaggcccagcacaaagcatggcaggagctctcggggacccgagttggcgtttctgtcacctggtctgctgtgaaaaggggtgggctgcacaggctcagctggcctcttcctccggccctgagcgttcgttggctgacctgacggatctgctgtgcagtatctgtactgtaagaacatgtgacggggcagcagcctgagaggacctagggctggcggatgcagggttctaggctgagctcaaagggtctgggcccctacctgatagcttctgagtcagtgtcactctggacagagcctttttccaaagcaggacacccaggagagggttctcaggagacctggggcccagtggcccttggtggctgtatttcccctccagtgtggtagctcctcaggggtctctgtgctgcctccccagttgtccccactgggtctgctagcatcacagggagaagccccctgttacctagtcaccccttccctcctttccccagcctgatctcctagtccctcccctcctctttcagggcagagactcccagtggagaggaaggagggggacaccaggctctagggcctgaaaggaggggctgagacgcctggtgtgacctcaccttgggacattacagcccctcgggcctccatttccaaggctgtagcgtgcaagtgaagtcttcgcttctgccccggggaagccctgccctgtgcatccagggaggcttttccaacacacacaatgtgcatttcttttctttctttttttttttttttttttttgagacagaatcttgctctgtggcccaggctggggtgcagtggtgcaatcttggctgactgcaacctctgcctcccaggttcaagcgattctcatgcctcaacctcccaagtagctgggattacaggcgcaagccaccacgcctggctaatttttgttttttcagtagggatggggtttcaccatgttgtccaggctggtcttgaactcctaatttcaggtgatccacccgcctcggcctcccaaagcgctgggatgacaggcgtgagccaccgtgcctggccacgcaatgcgcatttttgaactgatgagaaatggaaagaaccaaaggtccaccacgaggggaggggcagacacatggctggagagtcctattatgaaaggtatgcagcagtcagaagctaggtgggctgacagagaaaggtgtccaggaattttttgttttgttttgtttttttgtttttgaggcagagtctcactctgtggctcaggctggagtgcagtggcacgatctcggctcactgcaagctccacctcccgggttcatgccattctcctgcctcagcctcccaagtagctgggactacaggtgcccaccaccatacctggctaatttttttgtgtttttagtagagacggggtttcaccatgttagccaggatggtctcgatctcctgacctcgtgatccgcccgcctcagcctcccaaagtgctgggattacaagcgtgagccactgcgcccggctgaaatatttttaagtgaaaaatgaaaattgcaaaacaacacatacagtataaataatttatatgaaaacaaactgctatacattctctaaacatactgatgtgcagggaaaggtctagaaagatatattttacatgggttatagcggttacccgaaggggctgaaggggtgaccaaggaggattttcaccctccggagcccttcccccaggcgcagcgagcctatccaggcgcccagaccccacaaaaggaatggaatttctaatcccagggctagggccaggttgtaccactggcactcagagtgggaatcctgtgtggcttgtaaataactaacttcctggccactgatagtaaaactgccacagtcaccttttattaaccacccaccaagggcaaggcacggcccggcatctccctcacagcaacaaggtgagtattataagcatggaattgaccgtcaagaactgcagggtctgagtttcaccctgcttttaggctagcaaggtagcctgccatggtttcatggatgctggcagaagacgcaagactcctgggacccagacaaagggctttattgctcaaacacaacaggcaacaggagttcatgttcgccttggttccccttgtctcgtggggcagatttggaggtgggcccatgttcagtgggtttagctgaagaaccccaaacctggaaaactcccagtcttaggagggggcttccagcaaacttgcccaatctttgccctgatgggaagcattgtttttattcccctggaaagcaaacaaataaatcttccctcttccctggagggagacgccaaaatcgctaagccaaagggaagaatcaagctgggaactaagtcaagcaggtccttaacctgggaactgagtagtgcaaacctgcctcccaagacaaagctacatacctccctcacaatttgcctacaaggaaattccttgtcctccctcacaatttgcctacaaggaaattccttgtggacaaaggacagacagagttcagagtcatccctctgctcacaggagacaaatgcaggtctgattatttcctctgccctattgtttcactaagccagactacggcacaagtagctattcctgtaaattgggtattcagtgaaaagctaatcagaaactcaaaagaatgcaaccttttgtctcttatccaccctatgacctggaagccccctccttgctttgagttgtcccacctttccagactcagccaatatacatcttacatacattgactgatgtctcatgttttcctaaaatgtataaaaccaagctgtgccccgactaccttgggcatgtgtcctcaggacctcctgaggacgcatccttaaccgtggcaaaataaattttctaaattgattgggacttgtctcagctactctgtgtacacttcctaggctgttgactacacaaacgtccttgaaaagataatccagaacaaaagctgtcacaagacaagcaggaatgcaaggggccctggagaacgatctcccagcgtcaacagactggggaagggaggcgctcagaagttgagtcacttctaaaggtcacacagccaggacacacctgaccccaaagcccttgtctttccctcctgcctccaaaatgggctgctggtctagcctgggaaccaaacacccacacgcaagattgcttccaagtgagtgtccatggtgtcatggttatcacggtcacctagcaatattgcttccacgggaaaatccgctctgagttctgaacaacgacttgtagcagaatcgtgggcacagggcctgtctgtggcttgtggagcaggcgccgcccagatgtgcctgatgctgggatcgagtcatcccagaagaaaaaattcctccctggctgcccctgggtgatgtcagaggagctggaaagaagaaatgagcttctggaggtgggataaatgctcttttcttttgcagaaggaaaaaaaaaggtcacgttgttccatatttatttaaatatgaaatttatttatagagcaaaaagagttggtgttgacttccagcacccggccgggaagtggtttggccttgtttttgtctcctcagagcaccctgtcccctggtgacctaatgtgatttttcagagttggaggctagaccctgtccccaggctttcagacctccctggtcccacccagtctctggagcccatccatccccgcctggagaatggcaggttggggctcaagcttggcactgggctcctctgtcactcagtcctcatctgcaaaatggaggcgcgcacatctgcctcatgccgccctcgcagataaaaagcagtcaaatagtaagccaagcagcttctcacttggtaaattgctaatatgtgcatctgtatttatagagaagggagctgaggtttcaaggcttccctatctgtagtcagccactgtcccatagtagcctttgaagaaggtacgtccctgtcacagcgcccctctcgacttcctcccggccacccaggaggaggtgtcttccacagctgtgcctctgagctgtccctgagtcgcatgaggtttgtattctcagaggcttgggcagggctgagactggggcctcgtcctgtagagagtgaggactcttacccaggagatgctccctacaagaccctttaacattgcttattgcattttaacttcacagcaaccctgggagaaaaaaagctttaacgccgttttacagatggagaaacctaggttctgagggtcttgtgtggccaggcctcacggccagtgggggtcagagatgggactagaacagggacaagtcttccactgtctaggcctggcttcctgtccccacactggaaagcttctgaaccgtgacgccggactgagtgcctgcacccctgatgccatctctgatgtctcacgtgttgtggtacagcctcagtttccccctctgtgccctgggatgatgccgggcttctcgccacctgagattctcatgggattctaagttctcctcagttgaactgtgtggagttagtttggaaaagtccagagagggtcagtgatgtacccagggtcacccagtgagctgaagcatgccaggacaaggtccgagccccccgccgtagggtcagggctctgccagccacacctccatggcacaggcctctgcagggaagtggtggtggtggatgggtggccgccctgactcagggtgagcactgagaaccctgttcttgccttatgtgaaaccattcctgggtatgtcccaaataagctcccatggcagacagggaaattacagggcggggtggcggtgaggaggccaggaaagactaggaggacagagaggatggaaaaccaggaggagcaggccaaccgcccacactttcctgccaagggatgactggcagctgtggagatggcacctgcagcaaggtgcacccaggggccttggggagggccaggcccccatctcgggagatgcctatctgacccaaggctggacagctggggctggagatgaccccatgacatctctcaccacccaggcagggtaatgaaggtgtccccttcgcctggaacacttgctgctccctcatacttcaggccttagtttctctctttaaaaaaaaattgtataaatataagaggtacaggtgcagttttgttccatgcataaggtgaagtctggggttttagtgcaaccatctcctgaatagtttacattgtacccattgagtaatgcctcacccctcactctctcccaccctcccgagtctgcagtgtccttcattcccctctgtgggtccatgtgcactccttttttttagctcccacttacaagtgagaatatgcggtatttgactttttttctgagttgattcacttaagataatggcctttgaccaggcgcagtggctcacacctatcattccagcactttgggaggccaaggtagatggatcacctgaggtcaggagttcgagaccagcctggccaacagggtgaaatcctgtctctagtaaaaatacaaaatttagctgggtgtggtggtgggcacctgtaatcccagctacatgggaggctgaggcaggagaatcacttgagcccaggaggcggaggttgcagtgagctgagatcacgccactgcactccagcctgggtgacagagagagactccatctcaggaagaaaaaaaaaaaaagataatggcctttggttctatccatgctgctgtaaaagacatgatttcactcttttttatgcctgcatagtattttatgagcatatataccatattttctttatccaatcaaccattgatggacactgaggttgattccatatctttgttattgtaaatagtgctgctataaacatacaaatgcaggtatctttttgatacaatgacttcttttcctttgggtcgatgctcagtagtgggactgctggattaacagtggttctaatttagttctcagtttcgagtcaccttctcaggagggccttcctgacctgcctgggtagagcagcccagcctgctgggtgctggtgactattttcacatgctttatttctgcctcatcgtcctggatccacaaacttgtgaaatccatggagctcagctttgtctggcttcccccactgcctccaacacccagcacagggcctggcttgcaaggggtgcctggtccctctgcacgaggcccagaactatcatcgtagttcacttgctcacaggacaggatgacaggagggcaagctgcaccagtaggtgttcacggatgcatgggataaaggcagggccccacacaagataaaaatgcagggctctagttcaaggattcctgagcaaggttaacgtcagtggtgaggccatgtttgtaccatgtgcctttggtatgatgtgaggggaagagcactttacctctggggtcctcccaaaaccccataactcagtgggcacagtggctcacacctataatcctagcactttgggaggctgaagcgggcagatttcctgagctcaggagttcaggacaagcctggccaacatggtgaaaccccatctctactacaatacaaaaaattagccaggcatgatggtgcatgcctgtagtcccagctactcgggaggctgaggcaggagaagctcttgaactggagaggcagaggttgcagtgagccaagatcgtgctactgcactacaccctgggtgacagagggagactctgtctaaaaaacaaaacaaaacccataactccagtctaaccaggagaaaatcatcagacaaatccaaattgaatgacattctataagataacttaccaacactcctcaaagactatgaggaatttcaagacgacagcagagtgttaaaccaaacgccaagcccttctaagcacagggcctgggcgatagcacaggccacatacctgggaagcagcctgggcaggaggcctgagaagcaaatgtggggtgccccaggcccccacagcccttggaagcaggaaaggcgtccctgtgaaggaaccctgtgggtgggggtgaggatgggggaggaaccaggggcctgagctgcagaaggggtaaaggtgtgactgcgggcaggacccagggcccctctctgagggtcctcagcacaggggggctgccatgaagttgggcactgcccatgcaggccatgcagcccatctacaaagagacccccatagctgcagggccccagcagctgggacatcagagttcagccacccacaacccatgagtgtcccctgcatcccgagtctgctcctgtccccagcaacaagcaaaacaaagatggaaggagccccctcagtgtcagagacccctcaccgtgagggttcagctctgacccccactagggcgtgcagaagcaatgcccaatcaggaacaagaccagcactttaaattagacaggactcattcagaaaactatgtcagcagaaaaacagagaatcttctcaagatatctccaaggggtagaaattggggcatttggctttccccagctgatagcagtgtttgggtggaaagtaacatgccttcatattcaggtcaaactggtacagattcctcagcagttcccaatgaactctacggggaatgcaaagaatgttctaatgaggaaggggtcaggaggcctgggctctggttctctgttgccaatttgctgtgtgattgggatgagtccttagccctctctgggcctcagtttccttggctgaacagtaaggaagctgtttggggtgagctctggcaggcaggagcctactgtcctcactctcctgcagggctggcagggaagggagagagataggctgggtgagaaagggtctctggggaaaggaggagaagaggggctttcctggggctgatagaggcaggggagcatccgtgcagaggtgacacggggcgccgagggggaggttccgctgtggttaggagctgagttcagaactcacacttgggtttggatcctggctgtgctgtctacttgctgggtgactttgggcaagcagcttaacctctctgggtctgttttcttatctgcaatatagatgaaacggccatccctatctcacgagggtgctctaattagatgaggcagggcctatgaaaggcaaaggtggtcaggatgattgagggcaatggcgctttgcgagctgatactaccttacaacaaccctgaaaggtgacactgtcaatccttgagccctgaagaaatggacaatcagtgcaagaaagtgtcacccagcaagaaagtgaacaggaccaagctcccctactccacgagggttccccagaggcatgtacaatggaaattgacaacaggaaaatcagcagcccagtcaccatttgaaaagaagctcatggcccgatgcagtggctcacgccagtaatcccagcactttgggggccaaggcaggtgaatcacctgaggtcaggagtttgagatcagactggccaatatggtgaaaccccatctctactaaaaatacaaaaattagctgggcatggtgacaggtgcctgtaatcccagctactcaggaggccgaggcaggataatcgcttgaacctgggaggtggaggttgcagtgagccaagatcttgccactgcactccagcttgggcaacagagcgagactctgtctcaaaaaaaaaaaaaagaaaagaaaaaaagaaagaaaagaaagaaagaaaaatgatgaaagaaccaccccccacaaaaaaatgaaagggagacagacaggaaagaaaggagggcaagaaggaaggaaggagggaggaaggaaggaagtgcagacaagcccctgacccatagcactgcacacagcctcttcccaaatgccctggtgcaaccatgccaggacggcctggagcagcacctgctggccacttccctggccgcacggtgctggcatcctccctgcagtccagcagccgtcctccactggccataaaggcccctttctctggtggctgtttgtgttgggccctacccacctccacgggcagcctccagacactgctggcaggcacgaggacacagtccctgcccgctgctgaagggccgcctttgtggacacatgaaccagccggctggtgcaccctggcccttggaagccagctgcttccccctcctgctcatccaggaggtaaacaggaccgacagccagcctctgccacgttcccagccccctccccacccagctctgcgaggtcctgaatccaggaatgaacacacagcccctgttcttcctcaacccacaacataagtcactgcttctctggccaggcagcatgtatcacaggcaccactgacgcgtgctgcctggaaacagggcccagtcctgcttccgcaggcctcctggagctgtgggtgaggcaggaccgggatccgcctggggccacagctagggacagttccaaggtgtatttctcatttttaaaacactgcatgtatttaaacatgccctgccttgttccagagaagatctaaagcagctacaaggacacatcagatgcaaccagtgtaaatgaagactcggatgaaatgctcagaatgacttttttttttttttttaagagacagggtttcactctgttgctcaggctggagtgccgtggtgggatcctagctcactgcagcctcaaactcctgggctcaagcagtctccctgcctcagcctccttagtagagactataggtgcacgccaccacaccaggtcgagattttgagtatagtttaaaacagaggaacatcagaagccatgtaaatgttcaatgatagggaattgattaaataaattacaatatagccacacaattcaattcataatatttattatgcagtgattaatactgaagttataggtatagaacctaattaatttactacttatgtatttatagaacctaatggcaagtttgtatgtataggcctaagaggatttttcctcaaagggagctagaagtctcatgaccttcttgaaatgactatggcctccaagaagtcaagagtcacagtataaactctatgtattgtaaaatcccacttttacgtatgtgtgtagtctgggaggctgtaccacaaacttcaaagtgtccttatctctgagtattagaattgtgtattttttcatcattcttctaccagcgtgatctatgcccttatcatggtaagccacaactgtggccatacatcttcaagcaaccaaagcaaaaccaaaaatgtggtcagttactatttcccagtgttcataggagaaaataagtgactgcttttggcattaaagagggtagagagttctctggagaggcagggcaactgggaaggaggctggctcatagagtgtgaggacagggtgcagggaagcctcgatgaggggctgaggcatctgcaaatatcagacaatccatctgtccaggggaacacctggcagcctccctcggctggccccattcaggaaaggggctgactcatttcttcaaaataggatagagtgagatggggtcagacactcgctgttcgcttcttcataagaaggacaggtagcaacatcgcaaagagtcagccaagagttgtcgactgtctggcacaagtagaagaatatttggaggttactgaaatcagaatatacagaaagctgttcactccacccaagcctaggagggcttttccaccaacctcagaggaaaatctacagaacatattcaaaagtgttccaaatatctattgctgagtcacaaatcaccccagaacttagtgaactaaagttcacaacagcaatccttttattatctctcatagtttctgaggtccaggaaatcaggatgggctcagttgggtggttctggctcaggaaggatctcataaagttgtagtcagatggaggctggtgttggaatggctcaagactggaacagctagggatggccgagtgtctctcttcatatagtctcagggcctctccatgtggtctcttcatgtgtgacagcttgtgcttcctaacagcatggcagcttcaggatggctagtctacttatatggcagctcgggcctccaagcccaagtattctaactgaccaagcagaagctgcatcacatactataggctaggattggaagtcatccgtgttacttccattgctttctattggctatgagcaagcaacaggcccaacagattcaaagatgcaggacacagacctctccatggaaggagtgtcaaggtcactcaacatcatgtagattgagggatgttgcaaccatctttggaaaatataatcttccacacagagccatcaccaatatccagagcaggtaagaacaaactgaggcaaatgcaagtcccgaaacctttggcctttgaacatttgacattgacaccctaagactaccttttatctacaccaaattcagccatcataggcctcagttaacccacaaacactttgagctgtgataggcccaagtgtcggccaagaaatgagctttggcagtggccatctttgtctgtcagcaaggctgagtttgggcaattatttaaatacactgttgaggctgggcgcagtgactcatgcctgtaatcccatcactttgggatgccaaggcgggtggatcacctgaggtcaggagttcgaggcgagcctggtcaacatggtgaaactccgtctctactaaaaatacaaaacttacccaggcgtggtggcacacacctgtaatcccagctactcgggaggctgaggcagaggatcatttgaacatgggaggtggaggttgcagtgagccgagatcacatcactgcactccagcctgggtgacagagtgagactccatctcaaaaaataaataaacaaaaataataaaataaaataaaatacaccactgagttttacccatactatctgatttttgaaaaatgagtagaggccgagcactgtgactcacacgtgttatcccagcactttaggaggctgaggcaggaggatcacttgagcccacaagttcaagatcaacctgggcaacatagtgagacctccatctccattaaaaaatttcttaaaaggtggaaaacagaaaagtggacctacagatggaaattatggaaaaggtgtttgctcccacccctaagacagctgaggctgagacgagttaagaggggctctcatccgcccatgttggatgagagttagctgtgagttagttctctggtggaaaacaaagaacaacagcaacaataaaagaacaaataaaacaatgtgtctatctaaagtattttgggatacagttatacaatgcctgggatttgctttaaaatattccagcaaagaaacaaaaagtacatagagggaccaagatttgtcatgagttgctaattgttgaagctaggggtgggtacatgaggggtgtttgtttgtttgtttatctgtttgttttctgagacgaagtcttgctctgtcacccaggctagagtgcagtggtgcaatctcagctcactgcaacctccacctcccaggttcaagcgactctcctgcctcagcctcccgagtagctgggattacaggcgcatgccaccatgcccggctaatttttgaatttttagcagagatggggtttcaccatgttagccatggctgatctcaaactcctgacctcaagtgatctgcccacctcggccctcaaagtgccgggattacaagcgtcagccaccgcacccagccatgtgtcaattttcttaagttaattgattgattcataatcaagaaaagtcttcaaatggttattgttggctgttcctttcttttccctgtagtattcttttgctgtttttgaacttgttttgtctgccaagggagcaggtatctttagtggacaaggggtaccagtcataaaagattaagagacaattatggaagagtaaatgttaaatagaatgaattttggtcattagcctaatcccagacctcccccgatcccatccactccctgacttgaaaaacctccgttggatttccctggccacctcctgggcctggttgccagaggcgttttctgacgcaatgcctagcacgccctctggtggctactggcagaagtgcataggtccgtgctgtctttctgagctcacagaagccaagttttagagcttccactagaggtcacaaactggttgctctacaggctgaatgcgacctatagatgtgctatctataaagcatgaatatagggaccaggttcttaatatgttaccagcatttaaaaatctagatattttacgtacaaatccagatttctggcttctttggaaagccaagtctgacaatgacaggcagagacccgcactctccagttacccgtctggcctctgtggtttatgttcagtttctccagcacacaatccctgtagtgggcggaataataagtcccaaatatttgtgtccgccaggaaccttggaatgtgaccttattttagaaataagatctttacagatgtaattagtaaatcacctgaagataaaatcatactggatttggggtgggccctaaatccaacaatttatgtctctataggaagagggagaataccagctgggtgcagtggctcacatctgttatcccaatgctttgggaggccgaggaaggaggattgcttgaggccaggagtttgggatgagcttgggcagcatagcaagacccagtctctacagaaatttttaaaaattaaccaggcttggtggctcacacctgtagtcctagctgctcaggaggttgaggcaggagggtcacttgagcccaggaatttgaggttacagtgagctatgatcataccgctgcactccagcctgggccacagaatgagaccctgtctcaaaaaaaaaaaaaaaaaaaagaagaagaaagaaaaagaagaagaaggaggacaagaagaaggataaggagaaagaggagaagaagaagaatgaggaagacgaggaagatagacaggcacagaggagaaggccatatggaaatggagacagcctagagtgaggcatctgcaggtccaggaatgcaaggatggctggcaaacacagaagctggggacaggcctggcacagatcctccccaagaacttcaagaaggagccaaccccactgacaccttgagtttgaacttttggctgccagaactgtggaagaataaatttgtgttgttttaaaccacccagtgtatggtcatttctcatgacagccctagaaaaccaacatgcaatccccaggaaacccttgcccttctacaacatcccgcaaacaggcctctgctctaaagcctcaagggagggagagctcacatctcccagctgagtgatggactaatcattggaaagttctttctgctaaaccggtacacaacacaaacaacacaaaatcaggctagagtctataaaaagtggggggaagtgtacctggaaaacactgaaaaaaagtgggttgaaacaagatcataaaaagaaagaaaccctgctggtagtgggatcagggagggcttcatggaagaggtggcacctgaactgggcttcaaggatggctatgacaagacaagcagaaactggtgggagtgcaaggcatattccaggcgatagagcagtgaaagacccagaggaggaacgtgtgggtcatgcacagtaacattcatccatcccttccttgaatatttcttcaccaagcagtgagcaatgagcttagttggatgaagttatgtggccaagtggggtcagtaggttgaaatgaaacagcagagtctaaatctttacaaaatcctgggtccccaagcatgctaaataaagaatttgacatttacacacctccccaggggttttccttcaagctatttcactcacctcttgtatagagagggctgttggttttgtgtctttccagggtcccttcccctggtaatagacccatgccctggaggcaagcatgggcacatgactggcccagacctggccaatcactgcattccatccacctggcaacagtaacggatccaatcagggtccttccctgggattaatatgcagatttcgggtgcaaccagctctctctgtctgctggggcagtcttgttccctgctacatggagacagcccatcaggagtcagacagaatgaggccaacaggtgaaaagaaacagtaaagcaaagacggtcagcatggaggagccctggggtgctgaactcacagttgccatccccaaagacctggttcctcaaattcttccttcaattccaagacttgctgcaggatccccatcttctgtgagagccaatacattatttctctgtctaagccagtcagagttaggtaggtgtctgtcacttgcaaccaaaggctcttggctggtacagtcctgtttctaaaaccctgcccctgctgaccaagcaaccagtgaaagcaaagggagacggtgcccatcctggcagcagccctctctccggttcagacaggtcactccagggcactttctgatgggtgcttagtgctgaaaagggtgacgctgaaaaagcacagggatgtgaattgaagtcaattatgaatagggtaagagaagataacaaatcagactctctccaaaggacacacatgcccaccctcagtcattcctttggattacagttctctttgaaatataagctgggacaaaagttcaagaggcagaaagtaggccaatttgccaaaataccaaaataccttagatgcagccaccaaatttactggtgcaaattttgtaaatcaaaattactaaaaacttgtttttttaactaaatataacattttcagaaattcatgtaaagtgttgacattttggtttccaacaagaagcagctgggatatgttggcttggaaaaaatttacagaaagattctaaagggaaaagtaaaattgtttaaagtaactgaagagaaatgaatctccaacggtgagaaaaagtactaagagtgctcttagatgttttattttattttattttttatttatttattttttgtgacagggtcttgctctgtcacccaggctgtagtgcagtggcacaatctcggctcactgcaacctccacctccagggttcaagcaattatcttgcctcagcctcccaagtagtagggactacaggcccatgccaccactcccagctaattttttgtatatttttggtagagatggggtttcaccacgttggccaggctggtagatgttttagacatggatgatattcaaatgacaagtagagaaggtagcctaagggtgatgtcagggctgaattgggtcaagatcattcattcatgcattcatttcaatgtatgtcctggttacccacgaggcccaggcctcaaggatacagatgtgacaagacatgccaaagaacttggcaggaagcgcttcagggagtcaagaagatgcaacccagttctatatccttatagatatatcgtatatctagcccagggcagggtagaggcctgtgcaaggccatcaaggagcagaggcagcctagttctctctgcctgcggaggtcagggaagtcatgacatttgagctgggttaatttttttttttttttttgagacggaatcttactctgtcacccaagctggagtgcagtggcgctatctcagtccactgcagcctctgcctcctgggtccaagcgattctcctgcctcagcctcctgagtagctgggattacaggcacctgccaccatgccaggctaatgttcttgtatttttagtagagatggggtttcgccatgttgcccaggctggtattgaatcaagcgatccacctgcctcagcctcccaaagtgttgggattacaggcatgagccaccacaccaggccagttttattttttttttaagagaaagggttccctatgttgcctaggctggtcttgaactcctgggctcaagtgatcctcctgcctcagcctcccaagtagctgagactacagacatgcaccactgcacctggcttggcctgggttttgaaggatgtgtaggaaagtaaagaaaggagtggtgaacattttcaggcagtgggggcagccctaagcaaaagattgtaaggcacagagggtagagggaaaagggaggacaatgaggctgatgacaagggtgaggaccaattctccaggctttcaaaaggtgaaggaacttgactttcaccctgtgggtagtagggagtcattgagggttttatgtagaggaaagaccccacctcacccatctccatggtagttatgacaaaagtggacgaggagcgctagaaaggaaggagctagaagcccagtttgccagctgctgcaactgtccaagtgacaggtgatcagggctaagctggggaatgcactcattcagcaggtattgatgaatctgtacccaactagaaggcagactttagcctggacagttcagccccaactatttctccagtcttcatttgaatcctttcctgcctcccagccatagcacgcacaaggtctgcagcaccctctgcacacggtgtgcacccagcagaccaccaccattcccagccctccctactgtcacacaggccccgtcaccccttcacaaagagtttgcaacccttgggaaagcaccttcctgccccgagaaaaatcacactgagacacgtgttcttgtgtcttttttattggactgtgggcttcctaaggcaggccgggcactatttccctctgtatcctcttttgcaccacctaactcaatttctccaagcctgataagcaaagagccttgcatacagcaagggtgcaataaacccagccaagtggacatcccatctccaagggtcaaggccggatggtgtagctctaaggaaggggcagaccaaatgagctttgacatctctgggatttgatgatcccaggattctgaatccaagaatctggggttgaacgggctccttggagcccagtgtgtgagcagagggagaggacaaggaacaaaaccaaagagatccaagttcagtggagtcccaagcctgctgggaacaatgctggagaaggggtgcagggagagaaaggtaggagcccacgtctccctagctgccctctaactgctgcaggataggccgtcacctgcccatcagcagctcagcaagtgaacaggccctctcagccctggcccaggggtcttgcgtctcctgatgggggcccctccagggtgatcctgggggtcctggggcaacttcatgttgaacagctgggcgttgccaggccccaggctggccctccaggacaaggggagtgttggaggacctggctggagctagctgcctggcagagtcagggaggaggctggggctgcggaggaggagaggttgccccactgagcgcagcctctgttggtgtcactgactgtgatatcgtgatataagaagaaatatgtatttggtctttgccctcagttcctgacccagagcccaaaacctttgtaatttcctgagtgataggaacttctgacacagagctctgaaatcccttggaatttctggagtgataggagcatcttttgttccaatgaggtgactcctggggggctcctggataccctcaggataaggactggctgccaggggaaccaactacccccaaccgctggggaagggagaggggccaaaggttgaggcgatcaccagtggccagtgatttcatcagtcatgcctacataatgaagcctccatagaaacccaaaaagacagggtttggagagcttcctgacagctgaacacatggaggttcctggagggtggtgcccatggagggcatggaggctccacgtcccttcccacccacctcaccctatgcatctcttccatcgggctgttcatctgtgtcctctgaaatatccttcaccataaatgggtaaaggtgtctccctcagttctgcaaggctctagcaaattaactgaacctgaggagggagtatgagaaccctgatctgtagcccataggtcagaagcacaggtcagaacctggggctggtgacgggcatctgaggtgggggcagacttgtgggactgagccctttttaaaattgctaaattcattttaattttttttagacagggtcccactctcttgcccaggctggagtgcagtggtataattatggctcactgcagccttgacctcccaggctcaagcaatcctccagcctcagcctcccaagtaactgggactgtaggtgcatgccacctcatctgactaattgttttgcttttttgtagagattgggtcttactctgttgcccagactggtctcaaattcctggcctcaagacatcctcccattttggcctcccagttcgccactgtgcctggtgggactgagccctgacctgcacgatgtgtcactctctccaggcagtgtaggaattgaattgaatgtgggacagctaagtggtgtcccctggagaacaacttggtgtgtagagaaaaatccccacacattttggtgaccaaaggggaagtattgtgtgttgacagagtgagagtagaagagaaaaaaatagtttcgctttttttccccctcagatagactataaaggagattgaggccaggcacggtggctcatgcctgtaatcccagcactttgggaggccaaggcgggtggatcacttgaggtcaggaattctagaccagcctggacaacatagtgaaaccccatctatactaaaaatacaaaaaaaaattagctgggtattgtggtgtgcacctataatcccagctacttgggaggctgaagcaggagaatcgcttgaacccgggaggcggaggttgcagtgagctgagatcacgccattgcactccagcctgggcgacagagtgagactctgtctcaagaacaaataaataaataaataaaattaaaataaggagattgagaggagatagtgcagggaggggcctccttccccaccagcgccagggaagcaaatattcctgggagacttggaaggcatccaccctcccctctactggcatggctggaatcagaagaggatgggcagcgggagcaggagcttgacctcaagggtcagcccagctttctctagaggctgacccatcccacaggggtgcatcaaggatgcccacccttccagagaaacagtggcagagtcacaccaaatgtgcaatgtgagagagagagagagagagagagaaagcaagacaatcccgaacctaacaagacattttctggactcgtacctgtgcatgttttttgtttttttgtttgtttgtttgtttgcctgtgcacgttttcacagactcacaacactggacaactgagtccaatcccctcatcttacagatggggaaactgaggcccatggagaggtgctgacccaagttcagaagcaggtcctggaagaatctccatgtcttaccttcttctgtacttccccagtacccacgctcccatccacattcaaccatgacttactgatgaaaacacaggattttccaccttgggcattatctcagtgcgggaggcatgccaggagtggctacagccctgggcagctgaacttgcagtgagccaggcctggagcaacaccaaggctccaccacacacccctgcctgagccaaggtcagccctgggaaacagagtcttctcatccataaatgggtctgagtggctggtgatccctgcctcgtggagttgctgaggggattcaacagcagacgcagcctggactggctcacgcttgtgatcccagcactttgggaggctgagcccaggagttcgagaccagcctgggcaacatagcaagacccccatctctacaaaaagtttaacaattagctgggcatggtagcacacacctgtagttccagctactagggaggctgaggtgggaggattacttgtgcccagaagtctgaggttactgtgagctatgatctcaccactgcactccagcctaggtaacagagtgagaaaccttctctgaataataataataataataataataataataataataataatgtaaaggacatagggcattgaagggaacatagaaatgtttgttttttcctctcctctccctcacctattttgctcaaaatataaaaagttctggtttttgtttgtttttggtcaaatacaccccctcacctctctgagctctccacaaaggtggcgggtgggagggaaatgctgcctgtaggactctgtgtgcagtctgggttttttctttcagatttgttcccaggacccagttattcaccggagagaagtcaatacatagaccctgttcccaggaggctaaatgctgagggaaagcaaggtgccaggatgcggtgggcacatggggaggcctggttgaggacggtgctgtgcccagggagggggtgggcagggggttcccacgcatctgggctccagcaatggtttcccgaacggccgcagccacgtctgtactgcaggttgacacctgggcctgtccccggcaatgctctgtttgctgttgggccaaggaaccctgggaacccaggttgacaggacatggtgacaatggaaggattgttccagaagccggggccctggctggcctctggcttcccgtcacctgagcaaatgtcaatccgccaggtacaaaagccaacatttccctgacggttgaagacgctcattcagaaggcctccccctcagcaggctgcaggctcctcctagccactccgaatccgaaaccgctgttctcatcaccatccctttcatcctacatgctgggagcagccccttggcaaaccccatcgctcctcacgccaccttccagaaagctcctgagcctccaagtctgagcttgctggtggcattgagacacaatgaatggcagaaaagctcccttcctaaggagtcgttccagccagacgggcagagcgtgccctggctgcaggctggcaccgggggctttcgctgtttggaaagcacgggggctggttaccacaggtgatccatccagcagatcctggcccaaggccacagttagcaagctccagggctagagattagagctcctgtgcccagattccatccccctccacaccgcaaacaatttgttaaaagacacgtctagtgaggggttggcaaggcccaagagaagaaaagtcacagaataatgacgacagtcccccagctcagataatcccagaaataaaagtaagacatttaggtattcttctgccacactggccaggcgtggtggctcatgcttgtaatcccaggactttgggaggccaaggtgggcagatcagcctggccaacagagtgaaaccctgtctctactaaaaatacagaaattagccgggtatggtggcacacacctgtagtcccagctacttgggcagctgaggcaggagaatcgcttgaagtggggagacggaggttgcagtgagccgagactgcaccactgcattccagcctgagcaacagagcaagactgtctcaaaaaaaataataaaaaataaaaatacataaaaaaatagaatcatgggccgggcatggtggctcacgcctgtaatcccagcactttgggaggccagcacgggaggatcactagaggtcaggagttcgagaccagcctggccaacatggtgaaaccccgtctctacttaaaatacaaaattagtcaggcatggtggcgggtgcctgtagtcccagctacttgggagactgaggcaggataatcacttgaacctgggaggtggggtggcagtgagccaaaatcgtgccactgcactccagcctgggcgacaaagcgagactctgtctcaaaaaaaaatttaaaaattagaatcataatgctaacaagcatgtaagggcccgatacatactccactagcggcgctgtctcaactggttttacctttctcacaagccgtttgctaagaggtggttgaagtctttgaaaagctcataccctggatgaaaatgctctggagttggattgtggtgacggctgtatgacactgcgaacgtactaaatgccactgaattgtactgtactgtatttttatcttttaagagatagtctccctctgttgcccaggctggaatgcagtggcacgaccatagctcactgcagcctcaacctcctaggctcaagcaatccttagcctcacccactgcccctccttctcagcctaatttttttgttttgatagatacggggtctcactatgttgcctaggccagtctcaaactcctgggctcaagggattgtcctgcctcagcctcccaaagtgctgggattataggtgtgagccaccacgctcagccataaatgctgttttcgtgaaaaataataccaagggtaagaataatcagagtattgccagcagatggtgtttataaagtttttattttccattttcttaaaaataacatttgatttcctttatgcatgtgtggagtgtacttgtttccttaggctgagtaataggcagataaagacgacacgaggcagggtccccaagtggaggcggggcgggacgtgagaggatgggggcgcaggggaaaggcagggctggatgactcacgggactcttgagtgcccatcaacgcacacgcacacagtctaacactttgtttttcaattttttaaaagacatctaaaattactgagagatacaatttcagcagttaaatctacagacggaaatccaagcacttgaacacaattcctaactctaagctcagttattgcacatcacacagtttaagcaggcttcaggctggaaagcagtttgctctgctgggaacttcctcgggatgtctgggtctccttctgtggtgtctctcccctgggactgccgccagcccgcagcctctcgacgaccccaggtatcaaagctcagccatttgttctccccaggggctgagggctcgggctttggtgaagcagagggtccccgtgttgatgccaacggaccccaccccctccaaagtgaagttggaagcaggtgaagctcatggaaggctgaaggcaggcgggctggagtgaaggggggtgaccaccccccacgtgtgggacaacagggggcagtcaagatgccgccacccaccacccctcccttccaagctcccaggccatgcttccttctccatcacccttggaccctctctgagtggtctctcaaggcacatttattttctctgctgcaacctaccagatctgacatccacctcccccagcacccatgggccaaggaggcctggggcagccaaggggagttccaggaccaagcaagcaagaaaccgttctttgaacacatggttaagcttcttccagcatggccctaattcccctacctgcctaagccaggggagtgggggcaggaaggagcgaggcatcgaggagagggcactggaggggctgggtggcaggccccttggtcaaggtcacaaatcaaggagctgaggaaggaccgatctgcaaccttgctcatgaggaaaccttaaccttgtctaacaaaaagccactttgaggccgcccttcagctccacagggagctgctgttttgtctaccttttgaggggaccagtctcagtagggcgaaaggcagtgtgggggcttcggaaacaggcaaggctggacccctgcaatcctaccagaggctagttcagtcccttttgctttcttcctaaaacatatttacaaggacacacaaacgtgcacagccagaagacccagagacagagagagcacgtgtcccaggagcggagggtgacatcaagaggacaggggacacccttcctctgaactccttccttccccaggccccccagcatccttaacaacccccacccccaccccgaggaggaaagttccagaactccagctgggacaaatggaagagataggtagactccaatcctagcaagagcagaagtttcaagtagctccgagtcagaggcgcggctgcctcagagagcagagggctgatgtggaacagcatttccctgaactgagccggggctggagtggggaggtgaaggacagagagaggacaggagaaagaggggactgggggacctggaacgacgcgacacctcaacaatcagaactgggctgcggaatgggaagcagtttatggagttaagtggggctctgctatttcccccaagaaggactcggaagatgttgattccagggcagagtgaggggcagacaggatgaggctcttctgtaaagtccaacagacgctcacagatgctgggaggctggggactgccaggttgggagcctcacccagagagcctcactgcattgaccccacacccaccactcacccagcacacagggggcctctcctcacgctcccaggccaccaggatggcccccaggttcacacacaggcacacgcacacacgctgcactcaccacgcactgaagggcatcacagccccaagtctgggtaagaaattctccaccaaaggtgttaaggaatttgctttgctgaggagaactggatgggtgggggaaaacagcaacaaacaaacaaaagaaatgcacagggcctcttctcatctggtgagatgagctcacactgctcaggggatgttggggaacagcgaggtgtgaggtgtggcctcagagcccggctgcacctgtcctgttccctctgacttctcacttttccacattgcaggcttcaaaacagagcttggggaagcccctctgcggggcagccctagggaatcctcagaggggccagaaggaagccctgggggctgagggaagtggggctggacatggcctgtgggtggctctcccctggcaggaggaagatcatggtctcagagtgcggaaaggctgcagctttcggcagctgcttctctccggggtctcagggacagctctctctgttggtctgggcaggacaggagtgttaagggtcagggaggaggtgggcacacacccccttagcctagacccaggctccttgcctgctgctcctggccctcaggcgccctcaagtggatgaggggaccccagcaagggggatggaggcaggagttgcaccaagggggagccaggcagaggtcaactgtgtaaccaccacccagtgtccccaagagagcagcccagatcatggctccaccacgagacccagagaaaagggacaggctattccagggtctaggattcagagctgccccatctcaacacctaaaagctcccccaggctctgcagccacagcctcctcctgctgagccgaccccctctcctcaccctgttctacctgcaccacctgggccacctgggacagacctcagacagcttggcgaggcaccctgtccctggcctctcagctgctgccctcctcctctgccgccaccaccttcattctccgccttgggttaggagagcttctctagtgtttggggatccggcaaagggacagggcttgctgtggctgggcgtcctggcccgtctcatctgaggctggtggggatgtcacaccacatcggcccagttttgggaggacctcagctggtagacagctccctgcccctccctcccctttgcaatggggacaggctcgcaggccagagcttgacctcagaagcaagagggagaagggcagacaggggtcggttgagccagggtagaaaccaaggggagccagggtagaaaccaaggggtcagggctgggctggaggacacggctgggggatctcatttcatggattttgacctgtcaatttgtatttgtgtgtgaatgtattttaaaaccaacaacaaaaggaaagaaaacagctacaaggaggccgaaggggcctttgggtgactcactctgccaggagcagtgtggatcaaggacacatttgtcagcgcatgccacacacacacacacatacacacatgcatgcacacatgcactcacactgtcacccgtcccagccatctgtgccacacacatgccatgcacactcacactcccagtccccccaggtggagcagggtccttctgactgcatttctggatccgttctcgaagttgcctgctgctgctcagagctctgctgttgagtcccccccggcagccggctcctgagggcgtctaccagatgtagcccccgtcgtcagcctcgcctgcctcgccctcctcctcctcggcctcctcgcctgcttcctccgtctccttctcctcctcatcctcccagccgacaccgcttccaaagtcccccgagaagcccacgatgtcatctgtgaggggatcaagccaacagggggtgagggagcttctggcacgcaccccccagcatcccacgacaagggcccccaggcctgggcccccagcaggccctgagctgcccagcccgtaccgcagtcggggctcccatgcgtgcgcgtgccagtcagctccaggcccagctggtccacacaccagcagtcaccgctgctctggtcacactgcatcttccggtagtagccatcctcgtcgcagctcgggatgaagatgcctgaatgagacagtgccaggcagggtcagagcaggggcccaggctgtgggcccctcagagaggtgacctcaggtcctcatgcatgagcagaagtctatacacccccagagcccagccagaccgggtgctgaccccccaacaggcccagatgctgagagctggacaccagccagcaattctttcggctctactcgctggagatgaggaaacccgcttccttgaaccactgctcaggcccctgtgctagctcccagccgccccatcagtttccctgactccatggcccaagtcttctaggacagccagtctgacttcaccaggtttgacactctccatcctcccacagttccgccggcctggctgtcccctgctaggaaggcccagccttctcctcccagccactctgagtccgacctgcctccggggcccacttgctttcctgcaggctccccagctgaagctcccaggcgcctgtgtacaggtcacactgctagttctgtctttttagtgtgtccatttgtgtgttgtgtgtttccggactggcccgagctaaagggttatgaggccagggagtgcatccttcttgccatccgctcagagttgggctgggtctattgctgttgtatctctggggccggcccccaggtgtttatggagcatgtgagtgagtgtcactcagggagtggcctcactaaaacattagtcacacccttgctgaaggaaactgaactcagtggagggttccaggatccttctgtatcccaaactctagctccagcatggatgggcataaaattagtgcctaaaacacacttttcccggggcagattgggagtccctgccccaccacaaggatagacacaggaagggggcaaccctcttctgtcttcctaggccagggcctcctctgggctccatgtctgccatgaggcccaaggctggaggccctgggtctcagacaaacccaggaagccgtccccacctcctcctctgagagcctggtctggcccctcacctggcttcttcttggcggcctcctggatctggatgcgctccagctctgccaggcaggggggctctgtggggagagaagcagcctctgatgggactgtcccctggtgctggggggatgcactgagcccttcaaggcttagagacccaggcaggggctctgcaagatgaaaacaccccgtttctgacacggggtcaccccacagcaggggtgggaagtacaagggttctatggcacgaaaacgctcactctctatttaggggagctcattccacagctgtggatgacctgaggtccccaagaagtcctagggacccatgagaggagtaacaggattcagaagaggaggtggggtgaacacacagacacccaagtatgagagagcccaggggaacgtaatgctagagggaatgttagagagaactcccaggcctgaaaatacagccacgcgctacacaacaacacttcagtcaacaatggacggtggccccataagattacaacactatttttactgtaccttttctatgcttagttatgtttatttttttattttttatttatttatttttttgagacggagtcttgctctgtcacccaggctggagtgcattggcgcgatctcggctcactgcaagctctgcctcccgggttcacgccattctcctgcctcagcctcccgagcagctgggactacaggcgcccgccaccacgcctggctaattttttgtatttttagtagagacggggtttcaccctgttagccaggatggtcttgatctcctgacctcataatctgcccgcctcagccccgcaaagtgctgggattacaggcatgagccaccgcgcccagccttattttattttttgagataaataaaataaatttttgctctcgtcgcccaggctggagtgcaacggcacgatcttggctcactgcaacctctgcctcccgggttcaagtgattctcctgcctcagcctcccaagtagctgagattacaggcacctgccaccatgcctggctaatttttgtatttttagtagagacaggatttcaccatgttggtcaggctggtctcaaactcctgacctcaggtgatccacccacctcggcctcccaaagtgctgggattacaggcgtgagccaccgcgcccggtctatgtttagctatgtttagatgcacaaatgcttaccattgtgttacaactgcctgcagtattcagcacataacatgctgcacaggttgtaacctgggagcaatgggccaggtgcacaggaggccgcaccaccaaggtctgtgtaagtactcctatgatgcttgcacagtgacaaaatcacctaatgatgcatttctcagaatgtatccccctcgtcaagtgacgcatgactgtaaccggcagccagcctctaacttgtctgcgaccttgggaagtccccacctctccaagctggaagcctgcctggttgtaaaatgaggacagttcccggcctcctgcccaagaaagtacagaatggatggagtggccttcaaaggcccagaaagtcaaagtgctggagtgatgctggtcgcaggagggctgggcagtcagagtggtgaaacagatcacaataccacacatttgcagagggatttgtgaattacacggtgctctgcacagattttcttggctcatcctcacaacaggctccaagataggtattgttatttcctgacgcagatgaagaagcagaactcagaaagatgtggtcacttgccgggggtccctgactagcgtatggtggggcccgggctgaagctttgggccctgactgccgatcccccaccaagatggggagaagcatccagtgaggaacaccagggcttccccagctccagccacacaggtcaggtgagcctggggacctccattttccgagatgactctggtttgaaagctctggtttcaggtatattcagctgagaaatttcatcacatctctaaggctgatgacaacgtatgtaatcacttattggtggcacaaaatttaagatgtgcctaaaagaagaatcaccgagaagcaaatgcatcttcacctctaagaccctcacttgtacagccccttcccaagccctctgaggggccccagaaagtttacattcgttatttttcatattctttctttccttcttttttttttttaataggttcttgctctgttgctcaggctggagtgcgctggcacaatctcagctcactgtagccttgacttcctaggctcaagcaatcctcccacctcagcctctcaagtggcagggaccacaaatgcatgccaccatgcctggctatttttttttttttttttcacagagaggaggtctccctgtattgtttgggctggtcgccaactcctgggtcacatgatcctcccaccttggcctcccaaagtgctgggatttcttttttaactctttcttaaagaagacctccaaaagtatataagcttcaggacccacaaaatctggatccgcctgggagcctgccaaggaagggagctgaaagtgttggcttccctgggccttaagggatgaagccctaagggagtgcaggaagtgggcaagctgggaaagtgctgggcctggggacgtagccaagaaagagccactctgacttcccaagagagcctggaacttcgggtagagcccacacgggtgaggcaggggcctgggaggggggctgcactcactctccctccagaagcagaagcaccactcagcagtagagacccggccatccttgtaggtgtcacaggagttgaagaagggacggatgcagacctcgtacttgtccaggttgatggcggccagctccgtctggtccaggaagaggtcagcactggtgtccagcttggagaacatccagccaatggagtccttgcagctggcccccaggctcttgtccagccctgggaaaagatcaggttcaggcacgcttcatctggctattcagccgtttctccagccctccatctctccgcctcgccatcagccccagccctctattctgggtctgggcagcttggaatctaaccatgggattgagaaactcgagaacggcgaaaggtccttccttccacctccacataggactatgcctgaaccattcaaaacccgttctgaaagccctgcagggaaaagaattcctgctttccctgggctacccatgtcagggtttaagctccctccacccatgttaagttcttcctactagctaactggtatccctcctgctctggtggaagccgacttctttggggtgaaggttcttttggggcccagattgtagggcccagagtctggcaggaaggaacaagggcagactggcccagcatacacctgtgtcctcagccccttccctatttccctccctcctccaggcagagcagcaagcttcctaccgctggccgggccggctacactgctggctgagccattctgcttggagttctcatgaaggagctggaaccagtcccgcagccgatctcccaggtcagccaggtcctgaccggtgcaagtctctgcagaacagagagaaggcatggagggcgaatgtgcagtggagcagcaggctcgatctcagtctgggatcctgccctacaggccaggaggctgggcaggggtccgggaggcagcagcagaagggaaggtggaaatcgggggcttcctctcgagtcctctcccatttcccaccacccactccttcctggcatgaaaaacacacagcccaggttccttgtggctgagtccctccctctgcccaccttccaggcacccaggggagaaacgagggctgagcccacgcctcctgctctgtgttaatctgggcctctgacctcacagctccctcaagctttctgcatttttgccacttccctcttgctctgcacacctcttctaccaccctagagccctgaaggaggtgccaggtggcccttcagcacccctagcctggtggcccagcactgtcctcacctggtttgccatcggcggtggaggtggcagcctgctccgtggggcaggggcaggggccctcgcatcgcaccgccagctgcttgctgctcaggcacgcctgttgctccagcttacactgcacatggggaaaggtggaacaggggactgagggcttaccccaggggtccccacagctggggacaccctcaagcctctcatggcagccacatctgcctccccccatggagtgcccatgaacagcctgaagggtcctcttggttcctctgcagactgaggtgcacggtggagagaagcagggcccgggaagcagggctcagagctggtcctagccatgcaggctcccatgagcctgctcggccctctctaaggatttgtccctcccaggacacctgtctcccctcccctgcccctgtcacccctcccctgcccctgtcgcccttcccctgtgttagctgtctgttgcccccctggctctcatggcctgttccttggtccctctgtaatcagccatcagcccttccctcaatgatctccccccagtcaccccagtggacttttctcagttctcctgataggacacagcaccgcctatggagcatctaacaattcctcggccttcgctaagaactgcttctgccacagctgcctgctaaagccaggttctgaccagggccttttctcctggtcatatctctttcttctcatggggcggctgctaatgggaagcgggtcatcacagcgctcgacaacattatctcacttgggaggcttgggtttctcctgctcagcagagaacagcaaggcgcacagaggcccagtgacttgcccaaggccatgagccgggatgaaagccagacttcctgctgacctccacctccctaaaggacagcgtgacccctggaccggaccgcactgcagcgtcctgcccagacctcgccctggccttgggttgtgggacactagctcctcttcttctcctcctcctctctgccagctctgccagctcccctgcacccctctcacctcctaaatgcagcctctgccctggcctcttgctcattctctctctcctccctttcttctccctggatgacctcatccccacagcaatgtcaatcatcacccacagcgggtgactgaaatctgcatctcactccaagaaggcccctcagccctggcacccaccccaagccagctgtcagtgccctcccaaaccaagcaattcccgactccttgttgccagtaaaaacattcattatcagcacctgcatttctatgttacttttttttttttttttttggagacaaggtctcactctgtcacccaggctggagtgcagtggtacaatcatggctcactacagcctcgaactcctggcatccccctcagcctctcagatagctggaatcacaggcacacgccactgcacccagctaatttttgtattttttgtagagacagggtctcactatgttacccaggctggtctcaaactcccggattcaagcaatccacccgtctcggcctctcaaagtgctgggattgcaggcgtgagccaccgtgaccagcctaaaattttttaaatgctttctcaaatattgtctcctgaaatcctcataaaaatccacataaggtgcaaattcattctcccaatcggttccttcttccatcaccttcttatggaggattatttcctgctgccccagaaggcccctgctcactggtgaacactggcgcctccctgtggaaatcctcctttcttcccccactaacaattggatgccagagctccttcttccacagccctccacacttggctgaggtcttccctcagttcctttgacttgcagttacctgaccatagtgtctcttccaggccccactccccacctgcacctgtccgaggtcagggacagacagggtctggctccaactctcaggtagttccagccagggctgcaggtggccccagtatggctggctgcattgaacacactgaccttgccatctggccccacctcagtcctggaaacccctccggaggccccagctgggtcatcctttctgcttcctgtggcctcaggtgactccacccccaccctacctggggcctgggctcctcaccacagagctgtaagtgtggccatctgagccgcagacagaggcaagctgggccatgtggcagggcttgcagatggagtctttgtttccatggagtttcacggtcggctgcttgatcctacaggagagggtggggggcacaccagggtggaagtgacaatgaggaaggagcaggggaagggagggctgagcagacctgttccaacaggaaggcagcagcaatcttcagcagatcagccccttcctgcccctgcccaccctccccacactgctgccagaccctcctccagctcagaagggtggaaccaactgagcagggcataaattcccccagcttctcttcttctaggagtcactgagtcccatggggccttcaggtagcaactccaggtctgaaggccagaggtaaaagggggtcacacttcacttagggggtcagaccaaatctgaggttgcaaactgatgacctctgggccatacttggccaccaagtgtttttttttttaattgagttatttatgcactaacatttaccaaatgggagagttcacataaatacctggattcttggcctgtctttgaaaaatggaagcatgggagtcctggacctgcattcctacatagctgtaatagaccagggccaagaagcagctgcctgctttccaccacacctgtgctccacagagtggcccgtgaccaagcactcttcatgcattacattaccggccatgcccctgcagccttctaagactgcaaccccatctttcatcttctatgattcaggaaagaagggagggaactggaaccttttccagggtcttggagccaggcagagccttgtccttgggctggagctaagacttcctttttttgtttgttttgttgtgttttttttttttgagacggagtctcactctgtcacccaggctggagtgcagtggcgtgatctcggctcactgcaacctccgcctcccaggttcaagcaattctcctgtctcagccacacgagtatctgggactacaggcacaagcgaccatgcccagctaattttgtattttcagtagagatggggtttcaccacattggtcaggctggtctcaaactcctgaccttaggtgatccacccgccttggcttcccaaagtgctgggattacaggcaggagccactgcacccagctggagctaaggcttccttaaatgtccctcactcctttctcctctgcaagctacaacctctcacaagctaccaccttaaatatttcatgaagtcactgcatgtcagagctgaaaggaacctcaaattatatggtctaacctatttgtcttagagatactacatcaaggcccaaaaaggagatgtgactttccctgcatcccacagggtttggtaattgttctcatatggtgtggctttctccttgctcatctcttaaatgacttactttaggtgaaggcagccgccatgttgtgaggacactcaagcatccctatggaggggtccacatgatcaggaactgaggcctcccaccaagagcataagagtgagcttagaagtggatcctccagcccgacaagctttcagatgaaacagccccagccagcaccttgactataacctcaagacagacccagagccagaaccatctaagagaaccacttctggattccaaccctcagaaatgatgtcagataatacatatttgctgttttaagcactaagttttacaatttatttaacagcagtagatggctaattcataaggagagggtcagttgagcccttgctctttgaacacaccccctccagggctcccacctccccaaacctctcacctgtgctccagcttcttgcgactgatgcacatggcccgctggtagccctgggcaatgcacaccttgtggcggctgcacttcaccttctggcaggggtccttggtggtatccagggctgcaggggcacagagtcaggacacaggtcacctgggagaacccaggaacctccagccccacttctgagctgggaggcctctccctccagcagcccttgataaccagagctcctgagctcaggagtcccatccccaccggggcctggctgctcaaggagcccccaagcgggctaagggcttgccctctggtctcaagtcttcacacgtgtcagtcaccttcccccgccgggagagtcatgttaccttcatctccttgctgattgtcctcccagctcttgatatagtcatcctagaggacagagagggacaagggagaagggaaaggctaagatccatatcccagaggttcaactgcggggtcgaggagaggcctgggccagcgatgtcatgtgccaatggccgtcatcctggtggctgacccctgtccacccaggccctgccagctgcctcccccacacctctatccctataaacccatgtccagaatcctttccagcctctcccgtgagctcctgattgctcccatgccacactggaggctggcagggaaggcaagtcagaatgagggtgtggagggacacaggaggggagggggtgtgctctgcagagaccacacagagtggggtcctgggcagtactcacctccacttcctggagatcagggaacagcagcaggccatggaaaacggagcaggaagagaaagggagaaagatggggatatcagtgtgaggccctctggtgttcctggggtcccctgcctcatcatgtggccgagcaatggccttcgatggctgtgttcctctgacccccaggaaccccaataagaggccagtattcttacgtcttcatcacagagctcaagactggccttaggagtagcaggggcccgtggctttgagagggtggggcacccccactccgttcccagtccagccccagccccaccaccaggacagatgtccgaggtgcccatgctgcgtaggaacagagcttctcatgcctatgccctgggtgtctcagaaactgcctgagaaacggtgcactgtctgtctcctgccaaggccccttccttgtcagtccccactcctgacctctgcccaccatgtgagtgaggtgggaggaagaccccctcacccagtctgcaaagggatgctttttgctcaaggtctgacatctctgcagagctcagctcatacacggagtgagggaggaggccatgcctgtgatgaggcttgcccagttatcacgattcagcttcaaaccctcagaggcagaggacccagaaagggtcctacgaggtcacctggtccagccccccctttgtgccggagaaagcccagagacagatgacctgacccaggtcctcccgtcacacaacccaggtctcccgatgcccagcacagaccacttttcttgctacaacacactctctgaggcctaaggcacaagggagaccttctcaccctgctccagctgcaggggcctctcaggcccgtggaccgcagagtggccagaggcagagagcctcccacctgacccagctccctggcaagaacactcaacttatctggcttcctccctttcccctacggggcagagacagttgctaaaaaacacctaacagtcccagggcactcctggtggaaactctgccaggcaggcaaggagggggcttcccaggcctgcaggctggcagtgacaaggaccagctgcccacttcctctgcgtggggctccaggaggggctctgggagctggggggagaggggcatgagaagctacgcgcagctgcccccttcatcctgagttctgccatagcccaaaggagcagagatgtgtaggggtgagcagagctgtcaggtctgggggaaaagggcggtggggccatggcaccaaacggcacccacatgcgtgcagcagtgggcacacagaagggtgcctaaagggctttgaaatccaaggccttcaggcttctgaagcctcccctggaagctggcaagcgtcagagcaggcagggtgaggcctcctggacaaaggccgaaggggccagacccgagcaagcagttggcatcaccaccgagaaagatgcggtgtgcacaggcatagacctgagtgcatgcttctgcatgtgtgtgtgcatttatgcagacccaggtgcacccatgcacactcacaggtctgtattatgtagcatgtgtgtgcaggcatgtttgtgtgtatgcacatcctcatttatgcacaggtggacatatgcacacacatgtgtagtgacagaaggaaaacaaggacactaacaaggacattgttcacccagtgccagatggtttttatccagaaacgaggtaacaaaacccactctgtgagcagcctccagtttcacactcgaggctctccctcaggctggccttcctgcctcttccgcagtgagagaaggaggcagcaggagtcgggaaggatggggagggcgggaggaccgcagactgctcccgtgagagcccacggcggctctctccctctctctccttcttcctcttgctttcacgtgcctccccgtgtgttcctgtgtccctctctcctctgtctctcattgagcctcttcctcatccctctgctcggcccacacctggcccacacgtacctgtcctagcagccaagagtcccgcagcccctgggcccaggagcagacagaggaaggctgcaggggtgcttcctgggagcctgtggggcacctggcccagcactcaccccatccctcaggcttgacctgagcgctcctgagcccccaggcaagcctctggggaggctgcaggcaccacttccctcgtttgctaaaaccaacgaagccttctccaggagctcctcagggttcaggggtcctctgctgggggtccaccccacaggagatggagggaggccaagagaggtgcagctgctgaggccatgatgacaagggttggggcaaaagtggcaactggtctccatcagctggggtcttcccgtctgtacccatcatcccctggggcaggggtggggacaaggctgtgcaggtgatgggaaatggctgggttctgggagggaggtatgagccctcaaccatacctgccctcaaccaacaagatctgtgtgcccataacccacctgccccagagtggaagtagggaaggtgcctccagcccctgggtgtcatctgaggcccctggcaccggctcactcccaccttctggcccaaccctgctgccttaacctccaaccaggccgtgagtggaatttttgggactcagtacacagtggattctcaaaggtcaagaccaagaatttatgattagaaatttgggggaaagtggggatggcgtgggagttctaagaaaggggctttccccagctgctccaccatcccccactcccttcctgactcagctggcagggagggagccccttctgtgcaaagcactgcccccggttccagcctcgactttttgcctctgctgtggccaggctgggcaggcaggatggaggggccccagtggatctggattccaggaccctcactcccaggaaagcaaaggcagccagccagagagggacgaggagagcagggccctggggtcctgcagatccccaggcttcccccgaccagtgcaccttgggcaagcacccgacctcgaggggctcagtgcctatctcccaggactactcagagattaaagcagatggcacctgcggggtgcctggggtccaggaagcacttaacaaatcaaagctgctatgatggagaagagacccccggactgcaagtgcggaaaatgagggacagagatgccacatgaggaaccccaaaaaagtggagagggagaggccaccatggggacagcagagaccagaagggatacgaggagagtcccctaggaggtcttgtggggaggaatgacgaggaagtcctctgggcagctggggagtggccactctgagggtaaaactcaaggacacactgaggggtccctgaggccaggtgtgggctggcgccacctttaagctgaaaaaaaggtgtttgttggcaagtgcaaataatgcctttcagtgcagtgttgggtgtctatttatggcaccccagtgggctcattagcagttgtgagaaatagtctgatcagggcacctggggcttctcaggaaacagaggccccgttctacacctgagagtggtggcaggtggctctgctgccgacctcacctggaaaatggggatttggaagagctcgtggcttgtattgcatggtgcttatatatgcttatctatctacctatctatatgagtaaagcttttaatttaaaaaaatgttttaatagagatggggtcttgccatgttgcccaggctggtcttgaactcctgggctcaggcagtcctcctgccttagactcctacagtgctgagattataggcgtgagccactgcacccagcctgcatggtgcttttagagtaagttctctccaggcatttggatgggtctgccttttatcctcacagtcctgtgaagtagtcagagccaataggatcaacaccagaagaaaggagaaaacgaaggctcagagaggcagagcaactggccagagatggcaagacaaaagaggagctgagtcagggttccccatcgccccctcccaccccacaagttagagtctctctccttaagagaggaccagcatctgcactgaggaggaggaggcagagagaggacatagaaggggcactggaccaggagtccactttcagcctggcccacggtgtgtcctcaaagaagtcacttcctcgttgttgaggacctcagtggtgactgcaccttagaatcagccgaggagctctttatttttatttatttattgagacagagtcttgctctgtcacccaggcaggagtgcagtggtgcaatcatagctcactgtagccccgaactcccaggctcaagcgatcctcccacctcagccttccaagtacctgggagcacaggcatgtgccaccatgcctgtctaatttttattgtggtggtttttttcatagagatagggtcttgatatgctgcccaggctgatctcgaactcctgggctcaagtgatcctcctccctcagctccccaaagcactggggttacaggcatgagccactgtgcccttccccaaggagctttttaaaccttccagcacgcacatgctacctgagacccctgaaatcccatgggtggtacccagctcgggccacgcttctgtgctggctctaggcaggcagcttagagaccactgggccagccatcaggcctcaggtccctcccgctctgtgcttatgtctaatattttgcttatgttcttgggtgtcttcaccccaaacacggggcctctgggatgaaaaagaacagccattcttcctccctccgagggtgcctcacacaaagcgatacaaggtgtgctgaggagcaggccggccctgggagaacccaggctcctgcttccaattccaggcccgttcctggagcacgcttaccgtgccaccctcaccaacccaaagactgtcctgccccttcccctcccgaatccctctcgcttgccctccctgccctacacccaccggccaggaccaccccaacccgaaaaactgcagcgcctcctgagggtctccctcctcccactgtcttccacacggctgcggccacccggatccttccaaaacacaattctgacccggtctctctctctttgaaactgaatatacagtttgatctcattttggggaaaaagaaagtgagtaggtgaaaaggatttataccaaaatggtaacagtcatttccactgctgggtaggaatacagagaattctgacatctttctgcttttctccaactttccccaaaatttctgcaatgaacatatattactttgtaataaagagaaaaaacataatcataatcataataaatataaataataggccaggcgcggtggctcacacctgtaatcccagcactttgggaggccaaggcgggcggatcacgaggtcaggagatcgagcaccctggataacacggtaaaaccccatctctactaaaaatacaaaaatagccgtgtgtgatggcgggcgcctgtagtcccagctactcgggaggctgagacaggagaatggcgtgaacccggtaggcagagcttgtagtgagccaagatcacgccactgcactccagcctgggcgacagagtgagactccgtctcaaaaaaataaagaaataaataataaaaataaaataaattttaaaaataataaaaaatataataagtattatattttgaaagcctttcacgggttcccagtcacctacagaagaaattccatcttctcttgatctctccctggctaccccagctccaggtccttcctgcaaggttccagcatggccaaaccccagcacagctgtctccatccagaatgcaagttcacatcagccccagaatttctactcatctcccaaaacccagctcagccatcatcttcccgagccccactccttatccttcaggccagctgtgcctcacagaagtctaccattgttccagtgacaccaggcaatgtcgcctctgcctcactccgccctagttaaatagccagttccttgagagcagagaccatgtaaatttcttctctctatgcccaacatctagtacctagtaatacacactcctaacaatagctgacatctttatagcaattaccacgtggcaagcattatgctaaacacttcacattcattggcttgtttcctcttcacaacagctctaagaaacattactattattatctccatgtctcagatgataaaattgaggctcagagaggttaagtgacttaggcagggtcacacagcaattgcacaggagaagagtgctgcacccagaactgtgattccagaatccgtgcccctaaccagcactccataaatgttagctgatgaaaaaagtcctaggccaggggtgggtcccaggaggcccaatcccagcccacaggtggtttctcctaccacaccaactctgcttcaagtcctaggcagggagttttgcagccaggagaggagggtctggtggtggaaggggaagacacctgggggcccccgttctccaggcatttttcagaaaccccttcacatgacccctggttcagctggtttggagctaacccatcttcagctttgatctctgcagctcagctcagttgccatggagacggtgcccactgagccaagctgggggagacagcagtgagtgcgcaggcctagtcaggcttagggggcacatgctgggtgtttccaagtgctgtttacttcctgtcattttaattagcacccaaatcacccgctcacttcacagcttgaattaacccaatctctcccagcttctccatctggtatgaagcttgggacctagcagcgaatcagcaaagaagagcagccctccagaccctggcttatggggtcaagatccacctgcttctttgcagcacagtgtgacagagagacctcaccccctacacccctcaccaccaaggactcaggggcctgggctcctgcttggccttgccactgactgccagcaagtgagtcgcttcccttgctggactggcttccttggctgtaaaataaggatgacccccttgccttcccctctgagctgcagaagaacccaggcaatcatgtctgcaaggggactttgtgaactgaagctccatactttcaaaagacacaagacaggacacctgaaccccgggttctctggcacacacccggggagcctagggacaggactgggcagaggttctgtagggtctcagtgttacaaggggtctcaatatggacatctgacattgtctccacttgaggacacacagccagaggcacagcgacaggacggaaagaagacagtcatcataagactgaatacaccacaatttccctaaccctgttacggcatttcttcattttttaatagatcaagaatctctaaaaatggaagtgggccaggcctggctcagcctctgagaggccctgtatctgccattattttggcctcattcctcaggcaacggggcctgtgatggaggccagtccactgaagaaggcccaggactggagagaagcttgcctctgtggcctcctcctgccctccctggaaatagccacagggcacagacagaaggactcagaaaagagcaaggtggggcccagtggggacacctgggatcctcctccgctgaggattaacaccccatcacacacctgggagagggcacctggggaggcagtgtccctgtgagggggtgggggtggctgggaagtggggggcagaggggccagtcattaaatacttgagcctctcttggagggggcggcagaggctgtgataggcctggataaacagaaggagacaggcatctagaagactctggcctcccacctcctctgccctcagaggaatttccttggaggacaaaaatgtgcatatcatcactccctgcatgccaggagccgggctgggcctgggctcaggtatgcctgcgccaacacccacctgctgcccgggccctgacctccctgctggtccagtggcatcttggtggctgccctagtccttggtccctgctccgggcggtggccccaatagtccataaagggcagagaacagcgggaggtgtgaggggcccggggctatgttctgagctgcctcaggaccctggcttccctcctggaacatgggggtgggggtcagaattcaagcccagggaggtctgaggaagaccccagggctggagctgagccacaggccgtggtgcaggggaagagccccaggccacaagaggagtggggttgcaggtgcctgccctttctctggccctgtttcttcacctgtgaaatgtggggctcagtgcttctgagtctccaggattctgctcccccagttcttccaaactgagaacttggagatgagcggaataggagcccgaacgatttcagagacttcgcgtcctctgccctgtgccaggggacaaggggtcagggaaggagcgagctgtttgcatccaggcagaggtaagacaccagctgggcctggcttgtccttctatacagggcagccttgaccgactggcaggtgttggggaagacagcaggagggggctggacgccccaccctacagaatctgttctctacccgagggagccctgtctccaccatccacatgtctgacaggtggctggcccactctgtgggcataatatggtgtgggagtggggaagaggctcagagcaccctctccacaggataaagtgggagactggctgtagccagggataggcacggagggctgaaggacagggagacgcggggacagtcgtccttcactttatcattcactcctttatcccacaaatgaatcactgaaattcagggagctgggcttgttgctgtgtttgtcccaaccttttggggttccggaagaggaagagatctccccaaatcacccacacaatcagaccagcgccccagcccctctttacttgaacccacagcagggctacttggagaggggagggaggggtgcagagaacgggctggatgagatcctgtctggctctaacatgccacagtgcacacgtttacattgagcacctactgtgtgccaaacaccccatgcaatgctctggggatggggtggtaaggtacacaaggctgactgttcccagacccactcctcaggggatcacgatgggaggaatgtgacaaacacacattacaaataccagcagaaggactctgaagatacagcccgcagtgtaagtgatgctatgaggcagcatccaacctgtgccaaatgagttatggccaataaatgctgcaggaaccccaaggaaggagccacacctgcaactggatgctggccaagcccttgggcggtcagaggctggcacacttcaagagccacagccgggccaggtctgcacactgaggctgggcacagtggtatctaaactgtgtatgcaggcataggcctgggcatacatttttcccatccacggctcttagaagacccacattgctcctgcaaggagacgcgcagagacggggttgtggactgcatatctgtgtcccccccagacccatatgctgaaatcctgacctccaatgggagtcgattaggaggcggggccttgggggagggattcagtttagataagccatcagggtagggccctcatgatgagattggggtctgaataagaggctagaggctggcacagtggctcatgtctgtaatcctagcactttgggaggcggaggggggtggattgcttgagtccaggagttcaagaccagcaagggcaacatggtgaaaccccctgtctacaaaaaatacaaaaattagccaggcatggtggtgtgtgcctgtgatcccagctacttgggaggctgaggtgggaggatcgcttgagtccaggaggtggaggttgcagtgagccaggattgcatcactgcactccaacctgggtgacagagtgagaccctgtctcaaaaaaaaaaaaaaaaaaaaaaaagaagaggctacatagagctcatgctctctctctcagccatgtgaggctataatggccaggaagagggccctcatcaaacatcaagtctgccagcgtcctgatcttagacttcctggcctccagaactgtgaggacaaaataaatctctgttgtttaagccaccccatctctggtatcttgttacagcagcccacgctaagagagatgatacgtgtgtcctcagcctggtgcttgccccaagatgccattaggccccatttctcaggtttcttggtctccagctaatatacaccctcccctaatctggtcacaggtactttctctggagaaaaaagagaatctcttccttaaacccaaagacctgctgcccagcctgtggcggtggtgtggtaggataagcagggtatacatgtgggtggccaggccattgccaggctcttcctggagtgacagcatgctaaagcctctgcagatgatttggtttcacctccccactaaaccaccaggaaaatcaaggcccagaaaggtgaagtggctgctgcaaggtcacacagctagttctgtcccctcactgggaagatgagcagagcactctctctggcccttggggcttagggtaggacagagctcttctgtgctccaggtagccttctgacctttttgagaaggggacgggagggtgctggcttcccatcctctcaggctgctgctagactggagtagcatatgacagcctctccaggcaaagagggctcttctctccctctcttcccaggcttggagtctcgctgggtgttcaagagcccatcactctgctgacactgctccagctccagttagaaggtggggtggaggggaggtcagggaaaggcccaccctcccattctcaaaccccaattgttgttgttgttgttatatgttttgttttgtttttagtcactttatctggcaaaggacccaaaccccaattatgaaatccatcctgacccacttttgggttcttctcacacacccacacttacccacagacgtcggcgcagcgcatccccacactcgcagtggtttaggtgtgtggggtgggaagcagggaggggtggtcaggagggagcccctttgtggctacttgctacttgccttcttggtgttcctaaacacacgatattgttagccggcaggtaacaatatccctggaccagaccccaggatcatggtgaagtccctggcatacaggaagggctcagatctgcagtgaatgagtgacagtgagcgtgcagtaacgtctttctcacagggacaggcatggtgtgggccagccctagaaatgaggacccatctggtggtttttccgtgggggaggagcgtagtacctgccctggaagccctccagccccctggcaaggtgccttcacacctatgcgtccctttcagtttcctagtctgaaaccaaagctcagagggtttaggtgatgtgcccggcatcctggggccagtcagcggcagagcccgaactggcacccaggccagagctgtcccagcacactgcaccccggcccctcctgggtggagagctgcctctggagtgttgctaggcctgggtggggagtaggctataggcaggctgctggagacactgagggctttggcccaccttcctaggaggtgacactcctactcagggcatccttgaagactcagaggacacaagccagagtatactttgctcttcagggtagacccctccttctcactttcgctaagggtgaggcctagaattccctgaaaagcaaaattaagtgagatgacttggattcaaatctcagctctgctacttactagctatttgacctttgggtaaattacttctctgtgcctcagtttctacaaccataaaatggtaggctgtaaagtaacaataactatctcccagatccttgagaggcacaagagaccactcaaattaaagtgctttaatttgatttaatttaatggcagatgtgagtgctcactgcatcagggattcaacttatatgaactgtgcgcctcctgggtgccaagcactgtgttagacactcataaatataatgaaaacttcatagaagtggagtacaaagtagagaagagccaagaagaaagagaacagtcagctcttcgtagccaagctctgtggagcctgccctgaagaatgctgtataatggacctgtctcctccaagtgtccatccctctaggccctagatgctttgttccaaagacctgcattaaattccacccagttgtgcagggagtgaattgggaggtaggagcatcgaagagcagggcttggaaaagcccaggactgcccagggcagggtacagctagatctgtaggccagggagccaggcggagtccacaatctcccccgtcttctgccagaatcccctcctccctggcagccgggcacccagcattagaagagatcgacccaggcacaggctgtaagagccctcagcccactggaggggaggattactcaactggtaaatcctgccttccctataatcctagtgctcagagaaagatgctaagctgcgctccctctcaaccagctctggccaattccaaagtggagcaactccccaagttttcatgctcttcttcattctcctgaccctttcaacctgattccctcaagttcccccttcagttctgtccacaccatgtgaatgaggcatttccctcccaatcctgttccccaagagtatcccactcgtcctgcttgcctccaccctactaggacaaataggggggccctgtaccattttggggttatgaacaaggtcccagttcaaccttgtaaccccttaaggggttcaaacgaaattcccctctctcctttgaggaaccaaggagcatattttccaaagagctggcctaatggaaatataaagcccgttgctactgggcccagttagagtgccttcagcccttaggcaggaagtagggcttcttctggcagaagagggatatgtttgtagtgctggtggggaccctgtgtactgtctgggcactgcacaacttcagggggcaccatttctattgtggcacccctagagttatgcaatgcagtggctctgagctagcagcctccttcctgcctttctgcagaggctgtcaacagatccccagggccaggccctcttgcccagccttctttgtcctacttctctccctgaccctgtcctcctgcagccaggactaccttaaatggggttttagaggacatctgtcctacaaaagcctgaggctaccaaaatcaacacacacctaaagctttcccatgaatcttacatgtgcaagtcctgaagactttcaaatctagtgcctttcttctgatgagcatgagaggaagggggaagtggttggcaccaatacagagagacaggtgggtagcccagtgccatggggtcaagcagtaagtcatttattctcacccacggagctggctattggaagcaggtggaagaagggaggtggggaggaatcttttattttaaacctttcctgttctgattaagcatttcttttccctctgaccttcactggtcccattttggcagatcaaacagccagcgagtcggagggaggcctaggccagtgacacatggattccggatgggccggcctgctgccgccccctcgctgctgtggccgggctgctgcccaggaagcggcaggagactgcggctcatctgcgctgggcctgcaggtgcttcgggaaggcctcgcggggctccaggctcctgcggctggacaggtcgcatgtggggcgaaggcggagatcagcagcccatcgcggggcccggccactcagcctggagacctggctgcccgtggttcctgctgtcctctgtgaattacaacctgccagtttgactttggggagaaacagtcacttgtctgacggtaacaaaaagatccaaatctctgcctcttcccatcacttggctggatagcctatgaagcatgtgtgttttaaacaaatttccaaggaacttgtggatgcacgcagtttaaggagaaaacgggagaggtcatggtgtggcctgcgttgtactgggtgggtcggacgagggaacctggggaaggaggagtaagggccagggtcctagaagaggttttctggggtcagggccgcggtgagcaccaggtcgccaggagcagccggcgtcgcctctggcgcatccgggcccatcccccacagcacccccaacgatctcggggtccagccacaccctccgcccgccctgcctcacccctgcttccccagcccccaacccggcccggccgagaggaaggagccagccccgccgggccgccgcctgcgacttcccctctgatccacaggtgccggtaaacaaaagtgccgcagctacccccccgcccccaccccgcggagttcggcccaaggttacgccggggttcgggcggcgcccgccgggggcccccaaacccagcttctggactctccccggcttctcaagcccaccgggccgggagccttcctctggctccgagctgctcccctcgctccaggctggattcccccctgaaatgttggtccgggaaaaccagcctgggtcctcgcgcgcccttctgcacggggaccccagcccacccccgtacggacacgccttccaccatctcgcctagaaggctgctgggaccccagacccagagccccggtcacactcccgtcccatgctgtccccctcccgcaaagcccacggtgggaacagagggcaccgcgcgagccgatgccaccctcactgccggccccacccagacctgccggtgctgcagtgccccgtatgtgcagcctgcagcatcccagcggctggggcaggcccgggggcggctcgcacaacgcagctggggaccgggtcggggtccagcggcagccggggtccgggtccccccggccccgcaccccttcccactcccggcccgcaggggagaccccggagcgcgcgaccccggagcgtcgggcaggtgtggagctgggggtcccggggctggggggtcccagggccgccggcccgggccgcagggacaggggaggggcgctgggctgtgacccccagtactgtttactttccgtgtaattagccggccaggctgcggagcctcgggctgcgacgtgcggcggccgctcccgcagaccccggagctcaatccccgaacccgcaaccccgggtctctgccttggcagccctgcggactcacgtctcggaagcggttccagtgcttgatcttgccgctgtactgcgagatggacgacagccattgctcgtcctccatgaaattgccgggggtctcgccctccttgagccccttggcgtcgccttcggccagggctgccgcggccaggagcagcagcggcagcaccagccgcccgcagcccggggcgcgcatcgtggtctgggttcgacctgggggggtcttgacttctgcagtattttaatgtccttcctcccaccccgctgctggcgaagcgcacgcggctgtcctcagctctcctcccgcggtctgcctccggtgactggcggagagtgggtcgcggctgaaatgtgacctggttaggagatgcacttgtctgaaaaagcccagcactggacgcggagagggagagagaatcagagaggctgcgccagcaggggctgtaactgtagcatcagcatcacgtttgacatcatcatacctggtttaaaaaaaaaaaaaaaaaaggagtgggtagatttcaaagcgaagcgctccctcgatgagagcgccaaacgccagccagccgcagcggggcccagccccgcctggcacacagggagttgcagaccaagaaatccagaatcccgaaatgtccctgagctccctcaaaggatggagagcaagaagggccccaggatctccccggggaagatgggatgggggagagggcacaaaactctccggttacaaagccagccaggctcaggtgtcggaaagggaatttggccagacactgtttttctccccttgcctcccacccagaggggcctgcgccacagccctgacagctggcttcctgcgagttatggctctaccgtaatgggtggcttcgttaagacaaaagccgtataacaactggctgctcagaaccattgctccccagcggcaccgcgttgcgcaaggcaaggcctgagcactgagtggctggtgaaacagaggcagatgtcctcctccccaggcagctgtttaggggctgtcacccgttttgtcagctcttcccaggacaaccctaaaaggcaaatgtctgaccatttcatctgccttggaggctgcaaatttggaaaaggcatatttgcttatggttttttgacttcaagttagtttgaataagccactggggaagccggggagtggggggctggggtggggtgctggttttgtttgaggtgtttcgggttttgttgaaactgcgaccctccttattggctgtagatttaaatgttgacataccagcggggaaggctggaggctggccacagtcccaagagcacagcagaaatggggacaggtttacattacaaatacattaaagaggaaacatcatctgatgggacaaaacctagtgaacttttgggacccaagccctagattgtgtttttataaaaagacttagctgctgtgatctaaaaataaaataaaaatttaaaatgctttaaaaaacataatcttaatcagtaggaaaaaacatagcttacaaggttccttgtcaccctgaatctggcctatctgggaactctgaatgcctcagtggctcaggccggagtctcgttgggaaaacagaaaacaatagctccctttccatgttttcttgtttcctttgctgttggatttagtggtggtgctgcagtgaggccctggccattgacgtcttcatctcacagtaataaagcattcttcctgggtgtgtcctggcgctgtacagtgagagagcacggcttgctgtcgtggagactagaggacagaatcccacttactggctggattcttgagcaattacctattttctatctaaaactaatggtaataccatcattaaaactgctgtaaagtgcaagcaaaattacatactaagtgggcataatgggcatttttttaaaaagttagtctttcctctggttgggaagagaaggctacggtgtcccatagttctgaagattcatcaaaatttgccatcttttccaccatctcaatcctacaatcctagttttttgttgttttttttttttttgtttctgttttcgtttttagcaaagctagctatatatctctaaggcacttaggagataggtaccagataccacagctctcccattcctgtgctatcttaggggcttccagagttaccaaagttgctgaataaagagtttggaaaggtgctgtcaagatgcccatcaatatgacaatagctgtctccagactctgagggtcaaaatggctcccacagtcccaggtagcttctccagtgggacttgccttctgtagcaccttcaagctgggtcaatactagtcctgtgtcgaaagctaatcaacaacattccagtcccattagtgaagccaatagtaatgctatttaggaagaagaacccaaatttccagatgactggtgtaaaacttgtaggaaatggccaatagttttagtttacaaagaagaaaaaaagggccaggtgtgctgactcacacctgtaatcccagcactttaggaggccaagaggcaggaggatggcttgagcctaggagttccagaccatcgtgggcaacatagcgagaccctatctctatacaaaatttaaaaaatgagccacgttgcacatgcctgtggtcccagctactcggaggctgaggtgagaggactgcttgagcctcggaattaaggctacactgggctagcatcgtgccactgcactccagctggagaaacagagcgagactctttctcaaaagaaaacagaaaagaagaaaaagaaaaggtttttcaattttttttttttttttttttgagatggagtctcactctgtcgcccaggctggagagcagtggtgcgatctcggctcattgcaacctccgcctcccaagtttaagggattctcctgcctcagcctcccgagtacctgggattacaggtgcccgtccccatgctcagctaatttttgtatttttagtagaaatggggtttcaccatgttggccaagctggtcttgaactcctggcttcaggtgatcctccctcctcagcctcccaaagtgctgggattacaagcataagccaccacacccagcttggttttcctcatgtttgaaagaattactggcaggttagccttttcaagacaatagccccaaacatgaggagctgctgctaggtatatgtattaagtggtacatatattttacacatttttctgtttgcacttaatatttagcaattctaaaatggagaagagaaaccttagtttcctcataagaaacccaaattgaatacatcgagtttcgctcttgcccaggctggagtgcaatggcgcgatctcagcttactgcaacctctgcctcccaggttcaaaagcaaatctcctgcctcagcctcccgagtagctgggattacaggaacgcaccaacacacccggctaattttgtatttttagtagagatggggtttctccatgttggtctggctggtctcaaactgatctcatgtgatccatccgcattggcctcccaaagtgctggaattaccagcatgagccaccgtgcctggcctgaatgtatcttaaaatccatttaattccatttctagatgaccccacaagcacaaaaagataaacacacaaagatccagaattgttcataatagcccatcctggaaaccaattcaatgtccattagccaggaaccacctaattaaaggataaaacatacctgtaacagactattgtgcagacattacaaataatgatgtagatctgtatctattaaagaccaatgtgatccactatgtattgctgggtgagaaaagctcgttatataagatcatatataataggatcccatttggaagtatagtatagtatagccattctcaaactttctggcgtcaggagcccttaacactaaaaaattattgaggaccccaaagaacttttgtttctgtgagttatatatatagtgatatttactgtatttgaaaatcaaattaagaatttaaatttattttaaaataataaatgtacccatttcatattaacagaatattttatgaaaaacaaccgtctctaccgctcccccaaattagtaagagagtggcactgttttacagttttacaaatctctttagtgtctggtcagaagaagacagagtctggcataagcttctgcattacagcacgtgtatccattgctggggctgccgtaacaaagtaccacagactgggtggcttcaacaacagacgattattttctcacagttctggaggctcagagttcaagatcaaactgttggtgggtctggtttctcctgagccctctcttcatggcctgcagggtggccgccttcttgctgtgtcttcgtttcctctgtgcacacactagtctggtgtctctgtgtgtccaaattccctcttcttataaagacaccagacagattgcattagggccgaccctaacagcctcactttaacctaatcaccccactaaaagcccaatccccaaataaacagtcacattctgagttactgggagttagagcttcaacatgtagattttgggtggtcatgactcagcagcaggtataaatgaaaatagccagtaagagcacagtagaagcactggcagcaaactgagttaatctctgaaaacacatatatttataccctaaatctatcaatttacaatattctagaaaacaaaagtacacacacacacattctactaattatcagagtgatgtcaccatgtcacagagcctctggaaaactccactgaacactcgtgagagaatgagttaaaaaggcacatagcaccttagcgttcttatgaaaacagtttggacctcctcgtaggcatcccctaaaaggttcctggggactcctagaagtccaaagtccacactgtgagagctgctggtacaatctatatgacttaaggcaattttttttttccttttttttttgagacagggtttcactcactgtcacccaggctagagtgcagtgatgtaatcatggctcactacaggcttgccctcctgggctcaattgatcccacctcagcctctgaagtagctgggactacagtcgcatgccactatgcctggctaattttcttttgtgcttttattttggtagagacagtgtctcaccatgttgcccagtctggtcttgaactcctgggcttaagcaatcctcttgcctcccaaagtgctaggattacaggtgtgagccactgcccccaactttaaggaaaatttcttaaccttgttaagcctcagtttgtaaaatggggacaatattacctacttaagtgggctattgtaaagattgaattaatgcacaaaaaaataacaaatgtgaacactccactaacattagctattatttgtgaaaaatttcttaacttctcatattttatatatgtctaaatgtatagggagtagttacctctggaagctaacatttattttcatttattatttatttatttatttatttatttatttatttatttttgtagagatggggtcttactagtttgccgatgctggtcttggactcccggcctcaagcgaacctctggtttcagcctccgatttaaattgaagtataacacacagtgacaaaagcacaaagcataaacttgattatttttcataaagtaaacttgtcttcatttaaaaggacattttacaaaaaaaaaaagctattaataaaaaccataacggcagccactttcatcacttctagcagcaagagcttgaacattcatgctccctatggtatcgagatggaagctgacaggtgttccattgactcaactcaatacacctctagtgccagtgggttcccttgagctccaggacagtgagctccagcacagtacaagggcaaacaggaaccaaatctgaattattacgatgctggattctactcaatgcccagttttggaaactctagagcttgctttaaaaataatcattgtaagaaacatttacaatgtgtctaaaataaaaattactctccataacaaagttccatgtataacaacacagattctgtgaagtagcgagtgagagatttttttccctcttcctcttaagagaaattgagggtgaagtcagtgcctcaaaagctggctggagcagtgttaggtacaatgaactatttcagtgtagaatgaattacaaaacagtaatatgaaggaaggtttgattgtaagcacagcagcagcaaatcctccaacatttaccccattatcatttggtgagaggggaaccttaactctaacccttttactgttgttgctctctaccattttgctttttcataaaagttctacatcaaaactgttactccctcttccacaacagcactgaaaactgtatttccttagagctatactgtccccaaaattggaatacagacttcatgagagaatattttatctctgcctaccacagcatgtgaaaaaaaaggaattttttaaaatttaaatgttaaaaattttccaattctaccaatacctaccaacttacaaaactctagagaactcagaaatacacaaacacacattccattaaccaccagagtgatgatgctgtcgcgtcatagagcctctggaaaaccccactgtataactggtgagagaaacagagggaaaaaggcaaacaacttgagaagaattacttaacaagacatagggaagagtaatcactaaatcctcaataacacaatttccaattctatttagaatttggtatttgggcccagtgtggtggctcacagcagtaatcctaacactttgggaggccaaggcaggaagatgtcttgagcccaggagttcgagatcggcctgggcaacacagtgagaccccatctctacaaaaaatttttttataaaaagtagccaggcatggtggtgcacgcctgtagtcccagctgctcggtaggctgaggtgggaggatagcttgagcccaagaggtcaaggctgcagtgagccatgattgcgccactgcactccagactgggtgacagagtgagaccctgtctcaaaaaaaaaaaaaaaaaaaaaagaatttggtattcaatatataaagctaaattttccaaagacaaaaaacttagaaaaaaaagtttcctacaaatgttaagtcataagtctcagaaactcaaaagaagtgacatttacttcctggctgaggttgcccaatggcttgtcagaaagaaaccgagagagaggcacatcaagatgagatggggcattaactccatagtcagcttcagaattcagcactgtccctggagcactcattcccaagtgccacctaacaacaatctgaggtgaagtaaaatctcaatttgtatagaaaatgaatatccgtagaaagaggaggccttctgggaaaaaaatcaaccttgcggccaggcacggtggctcacgcctgcaatcccagtactttgggaggctgagacgggcagatcacgaggtcaggagattgagaccatcctgactaacaaggtgaagccccgtctctactaaaaatacaaaaaaaaaaaaaattagccgggtgcagtggcgggcgcctgtagtcccagctactcaggaggctgaggcaggagaatggtgtgaacccaggaggcggagcttgcagtgagccgagatcgtgccaccgtactccagcctgggcgacagagcgagactccgtctcaaaaaaaaaaaaaaaaaaaaaatcaaccttgcaggtactaatatgtaagtcctccatgaatgatccagctatgctggtaaataagtgagggcaacattgtatcccaacacaggaaggggtcaaattcaaactatgtgaactatgtgatcatactaacagaaacaccgttaaacattttattcacaagtgatttgtgcagtcccaataataaatctcactgttagacacagtcctcacaatgtagcaacttaacacagagttcagaagtgcagttaaagaatataaagagagaaagaatcaaggcaagaataaggaaggagaagaaggagaggacatggagggaggaagaatgtgaggaggcaggggtgggaggctggggctccccagcattcccgcctccctctgctggtccgtggtgagggaggagtgagggcctcctgtggctgacattcttccagggaactctgcacagtcctgctgatatcatcagtttcttttgctgctgccttgaaaagtaaacaaaaaagggctgcaacactgcaactccatcaggggcatgggaagatgagggtggggatggggtgaaggaacaggaatccaacaaatattaagaggacaaactttggtaggaaaatgatagaccaagcaaagtaaaaggcaaacaactttaatggttattttgctaaagataaaactctgggtggtaaaggaattaaaggcagagtctcaaagagatatttgcacccccgtgtctgtattagcactactcccaatagtcaagaggaagcaagccaagtgttcactgatggaggaacagagtgtggtacgcacatgtaacggaacattccattatatgtataatacaggaaggaaatcctgtcacctgacacaacatggatgaaccttgaggacattatgctaagtgaaataagccagtcacaaaaagacaagtcactgtatgattccacttatatgagatactgagaatagtcaaaaccagagagacagaaagcagaatggtggctgcgggggctgggaggagtgggaattactgtttaatgggtacagtttccattttacaagctgagaagcctatggagatggacggcggtgacggccacacagcattatgaatgtattaacagttaacgttactgaactgtgcacttaaaaatggtgaagacagtatgttttatgagtattttacgacaatttaaaaattaaaagaaaaaaaaccagaacacactaagggttataggcacaaattctccttatgcccaccaccatctcagctggtagtatgacgggtgtagacaccattagaggcaatggtgaatctatggggaaccacccaggaaagtcaccatccaaatgtccacatccctgcttggcaattaaaacgaagacacttttcttcagcacctggtgaagatgtttagtttctagtgctttccaagatccacctcaggagaagtcaatttgtccacaggaagcgtagtttccaaagctgtctacggtgaacctctgagagatgtgaattgaattcagctttagggagccaaagtagaagttctcaaacaactgaaaaggaagaataaaaacccagaatgaatatttaaagtatagatgaaaatattaaacatcagattatcttgtaaaaacaccaaaccacaacaatcccaacaaatctctcatgctttttcttttcagtgtttactctgaataatgatccaggagaggagggatgggggtgggagtgagaaaagaacagccagctcttctctctgattaattctaaagtctcccctgacaaatgcaccagagaaagaggttctgaaaagtcaaatccgaaattcatctactgaccagatatgaccaagaacttatagcaaacgccccatggccacaccctgactcacagagtctgaccaggctgcttctgacttccagtgactgaccatgcagggatctcggctttgttgcaccagggttaaatttgacgtaacatatatctaatcaacgccatttgttaggagcgctgactaaaataaatagaagataaggctcctgactcacaagtgattcagacaaaccactgagggacacagagcatgcacacacacacagaacaacccaagggacacttctactgccaacagaacaagtacaagtgattacttatcaaatacctttattagacttggattcaagccagcgacctaaaataaatactttttgctatgatcctgtactttacaaaagctttcaaaagtgtgtcagagtgagggatgaaccatacatactccaagagggactggactttgtgattaccacatttataaggcaggacccaaaatgacatcagaattcatcccaggaaaatgcagccatagtgcctgaataaggagcgtcaaagagtaaagagcgtaccttcctctgttaggatgtaggaattgctctttcttaaaatgtcagtacaatcccaagaaagccttggttgttttttagagatagggtctctcgctttgttgcccaggctggagtgccttggattgcagtagtgcaatcatggcctcaactcctaaactcaggcaatcctcccatctcagcctcccaaagcacggagattacaggcattagccaccatacctggccccaagaaaggcttgtgacacatgtccccaacgatgcctgaggggacctttgcacatggacaagtgactgtcttttcacttatttttatacaacctccacaaacatggaccttggccaccattgcttttcctcttcctgcaattaatggcctagcaaaatgcctgagggttcattaaaggctaactttataaagcccagtaaatattgattcttcaacatgacatcaacttgaccccaaagatctatttagaggttgtatgctgcattgtcttgtgtttcagaaaggtgatcagctcctgcctgcattgatttacacaattaacttctcttcctggctttggcagcctgcttaaaccatatccacccttttatgtaaagaaattcagcctgaaatggttatctgctaatccctttgctgaacactaatttgaagtgaaagacacgtcactaagactgacagatttatagctctgcaaactgaagccttctaggtacagaaaagctataaccaaagaagcaataaaagacaatacaaaagaaaactaaaaggaaactcataatactttcaacaagttactttttaaggattggcagcctgtgagtgctaccttcttctctttgtgcccatgttttcaagtagtggggaggccacagtgagaagctgcaagtgaccgacccatgacttcacttcaccttatgcagatggcctacagacagcatgaatctgccagggatattctcctactccaggtttaaggaaatagcaaatgtagcaatcatgaagttagctgggatgtgactgcaatgcaataacagaagaattgagagagataactaaacataaattctcacatccactaaggcaagagcaggctgtggaaagagtgctggattctaaacgtatgcccagacatgtaagctgtgtgactgtggacagaaggcaccacccactgtaccaaccacaacaggggcacaagatcataatgggcaaagacctcataagagcaagtacaaggccaggcgcggtgactcatgcctgtaatcccagcactttgagaggctgaggcagcgggatcacctgaggttgggagttcgagaccagcctgccctacatggagaaaccccgtctctactaaaaatacaaaattagccaggcgtggcagcgcatgcctgtaatcgcagctacccgggagactgagggaggagaatcgcttgaacctgggaggcggaggttgcggtgagccgagattgcatcactgcatttcagccagggcaacaagagagaaactctgtctcaaacaaacaaacaaataaaccaaaaaaaaagctagtacaagtaccttgtgtgctcactgagcagggtttaaaaaaaataaaaaatatcttgtaaactgtaaagtgctatggaaaattagtatttccgtagcaatatggtatttccgtatggtatttcttatgatgtttttaaatatctctctgccatcatcacccttgtatttattttacctttgtaagtcgccatgttctttcataccttttgataatatcacaacaaatggatttctcatccagacgtccctagtgccagtgccaatcttcatgtcacccttcctacctctgttcttgtcctctatgtttatgatttagtaacagataatttactagcaatttttcagttatcttactgcttagttattgttatatcttttttttttttttagacggactctctctctctctgtcaccccggctggagtgcagtggcgcgatctcagctcaccacaacctctgcctcccgggttcaagctattctccctcagcctcctgagtagctgggattacaggcatacaccaccacacccagataatttctgtatttttcagtagagacggggtttctccatgttggccaggctggtcttgaactcctgacctcaggtggtccgcctgccttggcctctcaaagtgctgggattacaggcatgagccaccatgcccagcctattatatctttattctttgtttttttcctttttatttattttcttaatagagacagggtcttgctaggttgcccaagctggtcttgaactcctgggctcaagtgatcctcctgccttggcctcccaaagtgctgggattataggcatgagacactgtgtcccgccaatgtatctttattcttaagtcttttagttctatcaattatttctaatgactcactaaaatataagccctacagaggaagaagctggatcctactgtactgtaacattatctagtagactgcatctgatcgataaatatctgctggacaaaatgacaatgaaaactaatgctgtagatgtccatgtacatccccaagtctggaaagagaaaactatgacatgcacttgtctagactgaatttaaaggtctaatgtatcagttcccaccaaggaatttctgaacaggacttgccaaattatattacttcaaatcaaggaggcgggggacatttctacatgtttcttatttgtgaaaacctggatctctttcttagcttcagttcctgatctggaatattgctgagcacctgatgttatgcattttcatgcaaagaggcacatgaaagtagttctgtctcccaagtgcttaccatctcgttagggagagtgcatatcagaagagggaaatgctgatgacctgggtgtgtccatcttatgaaaagtcactgagtcctttactctgtgatctgtgtagctttctgtatgtatgttctactttaatgaaaaaagcttacctaaaacaatataggtagtaaaggttaagtgcgtgagatgagaggtacaggccatcaataaatgcagcaggaggtaaggaaacaagggatgctgagggctgcggacctaggaaagccatctggaggagacgagacctgagctgggccttgtggcaggtatagggcgtaacacagaggagggagggcagcatgaaggcagaaatgggcatggtgggctgggccaggcaaacagtttagatgtttggaaggttcctagagtgaagcagtgagaaagacagaaggaaggagaatcagattaagggtgtctgggggacctgaggctcaagttcacaagttatacttcatcctacatggtggggaaccactgaaggctttagggtaggttggtggcccaagatgaaaaccatgttttagggagattaacctgggtatgatgtattgtgctgactggagaagggaacaagataaagaaaaaaaaggagaccatggtagtagttcagtcatgagggtgatgttgagtgtctcaactacaaacaggcagtgggcttggaaagactggagcagatgtgaatgaatgaatgaagccatgaatgaaactataaatgaaacacagaccggagctaaatgatgagaacttataaacacaaagaaggaaacaacagacactggggcctccttgagggtggagggagggaggagggagagaagcagaaaaggtaactactgggtactgagcttaatacctgagtgatgtaataatctgtgcaacaaacccccgtgacacatgtttacctgtgtaacaaaccttcacatgtacccccaaacctaaaataaaaattacaaaagaaacatagaaacgccttggtgactttctagatgagaaggagatggaaaaatcagtgatgatgggtccaatgggtgtatatgaggctgccattgacagtaacagaacatttttgaaagggagctacttcatggggaaaacaacaagttcaggtgtgtttacacactcacggctgtatcttacccactagctctctgtgtcccaagcccttctcgattctaggattttcctggtaggctctgagaatatgcatcagagacacctgtagcacagttaagtggaaacagatcactataaaaggctttatgagcgtccctccttttattgagttgtagttctttttatactagggaaatgaaccttttttgtctatgttacaagttgcaaatacatgtatttcctctagtttgtcacttgtcttttgactctgcttataatggtatttaccatgtcaactttaatttttatgaactcacaattatcataacaggagattttaaaaacaaagttacctaatgccaataattatacattaaaagattggccggatgtggtggctcacacctgtaatcccaacactttgggaggctaaggcaggcagatcatctgaggtcaggagctcaagaccagcctggccaacatggtgaaaccccatctctactaaaaatacaaaaattagccaggcatggtggcggtcacctgtaatcccagctacttgggaggctgaggcaggagaatcacttgaacccgggaggcacaggttgcagtgagcggagattgcatcattgtactccagcctgggcaacaaggcaaagctctgtctcaaaacaaaacaaaaaaaagatcaaagtgaactagaaatatgtaggtattgacaacaacagtaataaagatgacaacagccaacatttattaagtaaacacatgtgccaggaattatcttattgcgtcctcacaaccccacgaaatagatactatgtttttttttccttttttttttgagacagagtcttgctctgtcgcccaggctggagtgcagtggcgcgatctcagctcactgcaagctccacctcccgggttcatgccattctcctgcctcagcctcccgagtagctgggactacaggcgcctgccaccgcacccggctaattttttgtatttttagtagagatggggtttcaccgtgttagccaagatggtctcgatctcctgacctcgtgatccacccgcctcagcctcccaaagtgctgggattacaggcgtgagccaccgcgcccggccaatagatcctatgattaatccccatttacagatgagccttaggtttagatggcttaagtaatttgcctaaagacacacacgaagttgatggtgttcaggacttctcaaaatgtggcaccttggcatttgagcaaacagcagaagcaggaaagtctctctcaccttccacagcccctcttccctgaagcagacgataaaacctatgaagacctatgaaggccgtcctgtgacctcctgctcttctcccctgaagcaggtcataagaccctcattcgacagataccctccctttgcccagaggaaaggaatatccttatctgtgaagacatagagcatagaaaagaatccgaacaaacaggccttgctaagcctcccctcagtttattaccattaggccacaccctttgtcctccaaccatacttctccatgacagtcaaacttacttataaaaatcaaacctacttacaaaacctttatcaaacctacttataaaaatacacaagttaccacttcctttggatctttattctgaaggctcccgtgtcatgtaaagcttgtattaaataaatttgtatgtttttctcttattaatctgacttttgttacaggggcctcagccatgaacctagtgatgggtgagagaagaaatctttcctctcctacaaaataaaggcaaaaaactgagattcacacccagacagcctcactctagagtctgagcccgttgattcctgtactctattgccccttaatgtgagtggctccccttgaaacacagccccattaaatagccacagtgaggaacgctgacccagacaactcccaaagactgaaatgaacatgttctttcacttgctgttcctatattcactgccactgcttttcctggacctggtttaagaatcggatggctctagctcagctggaagcattttaattgaattctggatgaaaataagcacgagtcaactaaaaggctatatttaatttggtatttgaatggggaaagatgaaaaagcttaaactacaagtttaaaaaaaagaaacttggttgctcttttgaacctgaactaaacatgaagaacaaagtgttgtattgtttagaaagtaacagacctaacaggaaaaatttaaattaaaaaagaatctagttaaggtgtctgaatcatgttgaattttttctcctcactgttgttttataacaattcccttggggattttgaaacctgaaaacattttccctgacacgcacacacatacagccctgttgttatggaagtcagtattttttaaaacctgctataaaggaacataacaacgaacagtacacaaaactacaaatatttaatgaggaaatggaaataggattaaaactgccaatcgctgtgatataattagtaaataataagtactgacttggacgatttaagaaaatttaaaaccacaccgggcggggtgacttatgacttgagttcagagggatggctggactccagaggagagatggcttgacttccgggaagagccagccagaaacaggcagactttggggtaagattacttgcccatcccgtcccttctccagctcccatgtctgctgagagccatttccatcacttaataaaattctctgccttcaacatccttcaagtgtctgggcaacctcattcttcttggatgccagacaagagttcaggacccattgggtgcgggtacccagaaaaggctgtcacactggccctttgccctcagtggcagagggcagccaccccacatgacgaggcaagggtaccactgagctgatcacacgctgctgtccacagacagcgggacaaagagaacattctaacatgccctctggggctttggggatcgctggcaccctcacctagacactgccacggggcccacacagagcctgcttctgccagcacccaaaatggccagccagatcccatactcacttgctcacgtgctccctcccacaaggggttgagcacagagagccaaataaatggggcacccccgtcacaagtctgacgaagaggtcaagaaaaatcctgcatcaataatatctttagaaaattaaacaaacttttcctatcaccaagtaaagagagaaatgtagacctttgatgaaaggtttttggtcaaaatcaaggttttccctgacaaacaatggcaagataaaatccaaccatcctgctgtcccctgctcacatgatctgtgaagcctaccattttcagtttgtacatgtttctttcctagggagaacacaaagggaattattgatttctggtaatgttgtggtatacactgaaagaaaacaaatagcaagatttaagggctcactgtggttatttttccttgcattcgtttcaaagcttctactccttccccattgccctgtgacacagccatcaaagaccagaaataactccaaatgcaacaaggctgccaaaatgaaactggcaatctcaaacagaggtggggaggagggtggagaggggccttttcttatatctgtgacctcgggctatagaaccgaataaatggccagtccgcaacagcacagtgacaatctgctggggatccctgctcacttggctttcccaaatgaggctcgctcttttcttcaatcttagacaaagctgtggttactctcttccaagatccctcttttaagaaaatctacttcttgtgctggtggcctcggtgaactatttgctgtctcaatactacttgaataagaagaaattcagttttgaagttaaaaatgaaaattcaaaatattcaagtcttacgctatttataatcattcttgacacacatgagataaaccaacctttagaatataatctgatgcaactgaaagtaagtacagggggttcaattaattcaagtatttagaaggatgttctaggtcatatttctctctaagaaaggatgctattgttctcatgtatggcaatcagacttttgaaactcaaagcagagtgaataggaatagcaaatgcatgctactttgaggttttcccagtgtttttcttccacagcctgtttaccaacttctatttctcacaattatcccgtttatagataaaagtagtaacactattttgtacttaataataacacttaaccacctacctccctatgagggatggtatgaacagaagacaggctgacaagtactttgagctctttgggaaggcactcccagtatgaagccttgctgtggttaaataacacctttcatctaaggatctaaaagtgtcttacaaagcccagctcattaactccaaaaaaattgctatgatataaaccagagctgagcattattatccccatttatataagaaacagggacaagctaggaccactaatactgtcagagaaatttaagagttcctgggatgaggcctaggatacaggccagtggaaggccacgtccacaaggcagtgtgtatgggcctctcaattccaataacaaatatgtaccaaagaatgccaagtggggaagcaggtccatccttaggctgtgcatatacaaccagatagcaaagaatgaggagcaaatgatgtgaaaagctatcatcacagcccttggaagatcccaattgcaaaacatcaaaacaaataatggtatatttcagatgcattcctcataaaagaggcatgtaggtacaggactagtatgacttcagggagcaaacagaaagatacaaataccagactaaaaatataatcgattttgaaaaaaaaaaaatcaaggttcttcgtatgtcatgttactaatctcactcagaattaagatcactttattgggagttaagtcatcaaaaagaattaagttcacaaataagttaccccccccccaaaaaaataaattttgtttcaaagttatgtttattaaaattcctcaaacctaaaaaaaaaaaattctgagtttctgccaaataccgtgcatttgtcttctgggccacctgtgagattacttctgaggagaccaaatgtgggaggtaggaagaggcaagaaggaaatggagatccaccacatccggggtcaaaaaaaaccttccatctactttaaaaatactcacatgggctgtgcccaagtggattctttctaaacatcatcacagaagaatgtaattgagtctgtttaccctaaggtaagtcatgctcctctacacacagacacacataccttcacctaggtacaaaaaaattgatatttcttttctactgaagaaagggcacaaaaagtttcttgggcagactagacgtttttaatgctttcctattgtgaaaataagtaattcaaaatctaagctgttggaatcttaacatattgtaaggcttaagggaatgtgattatgtgagtcacttaaacttgtatctgtaacctgggcagctgtaactgttgtttttctgattatagattagcctttttcctcacctacactgttttgtaaatggttgtaaatgaataaacagtgccagagaagatcccttcccttttaactgttgatcttcattttgattaaacttccctcttacatttctcatacaaagacttaaaagactatcacatcatctaggatggtatgttaaatactttctttttctttttctttttcttttttttttttttttttgaaacaaggtcttactctgtcagccaggctggagtgcagtggcgtgatcacagctcactgcagcctccacctcccaggcgcaagagatcctccctcctcagtctcctgagtagctgagactacaggtgcatgccaccatgcctggctaatttttgcattttttatagagacagggtttttccatgttgcccaggctggtctcaaactcctgggctcaagtgatcctcctacctccacctcccaaactgctgagattacaggcgtgagccaccatgccaggtcctacactcctaagttggaaaggaagtgaaaacaagctgtacagaaaagaaaacaaactgtaattaactaaattatagctcataaaccaaccttgtatagaaaatgttataatcctactaaatttgttttctgcctatataagcaggaccttaacttttaactttaagcactgacctcatttctgtgaagtccctgtttcccaaatggccattcccagcttttcacttgaataaacttttaaaaactgagttctgatcctttccattattgctggtcgacattatcaatgactacagacccactccctcccccaatttctccatctttaaacagggatgatcctttacaaagatgttctgcagttaaagataaattataagatgaaattttgagctctgattattattgtcactcactgactataatctctaatgcatcactgcaggaaccaaaatgcagagtatccttaaaagaaaaaaggaagaaggtttatcaggtactctgacagcttacaggctctacagtcattatctggtctcatagggctgtaatatttttaaagaccaaaataggaacatctacttcagaataaaagacaatgagggtggcaggtagtgactatcctagagtcatctccaaacacagcttaactctgcccaagatgccacttttaatctgaaacatcagactgcagtgatcagtggtgtgagagccaataatattatagtagctaataatagccaataaaagagaggacataatgcccttccagaaggcctggggcacctcagatccaaggagaaaggtcaagggcagtctgtgggaggagcaattcttatcaacatcgtggcctctattaggagagcagcaaaaaggctgttaagtcagtagaacagctgtgatttttcaacccatcagcaggccactcctgtttttgtctccattaaaatagtaccaaaaggcttgtgtgtccccagagcccaagtcccctctccactgactgagatggcattccttgcacagaatgggaacagcaacttcccctcactcatcctgctctcaaatcacctgcctgtcttgctgcagtgagcaagaggaatgctcaaatgagcattagcctgacctaaggatgtgctggcagaaggcagacaaacagagccagggagggaaggcttgaaaacttccttcaaataatcactcagggatgcactttgggaatttggcctgaggctcactgctgatgtaaggattatcaagtttaagactgctggtaaggccaaatgacctattagaggatgaattaaaaccgctatatacaaacaggatgccaggcagttctgctgagcacctcaaaattcaaaatgccaagggatttcccctctctgcagtctttcaattttgaaaaatagtaagaaaataatatgagtaggggtaggaggtagaggagaaaagaggctacgctgacccggctggagaacccacacctaatctccgcctaatctcggcacaggctaggcacactccgcccgtttccacattacgtcacagaattagcctcagagatgagaggtgaaagttcaatttgctgcattatttcttcccaaagaagccttgccacagggcatgggtattactgctttacctgacaaaactgcccctggggctgatggctagcagagactcttcaagcctgtgactagcaaccctaagggcaggtgccctttcagaactaatctagatgatgtttctgcagataaattctctcccttagaaaaatacctcttcttaatgctcttatttctggtgtggtcatcttccctcaggtattattcataatggtccctcaaacaaatgcaacagaagataaatgtttggtctccgtattacacagtagaaaggaagagcaagtcagcagaaatgaatccttagaggggagtacacaggggacagcaacagggacatttcttcctggcccccggcttttgggaggctgggcacaaagtggctgactattgtgccaaggcaacagattcaggagcagcatggaggaaaccagtcaccagcctcaggccatctccactccaacttctccaccaacaaggcagcatccagaagttaaagagcaaatcaggccgggcgcagtggcccatgcctgtaatcctagcactttgggaggccgaggtgggtggatcatgaggtcaggagttcgagaccagcctaaccaacatggtgaaaccccgtctctactaaaaatacaaaaatcagctgggcgtggtggcacgtgcctgtaatcccagctactcaggaggctgaggcaggagaatcgcttgaacccgggaggcggaggttgcagtgagctgagatcacgccattgcactccagtctgggtgatacagcgagactccgtctcaaaaaaagcaaatcagatgtctctaggcaacatcagacaatgcaaagagtacacatgcatataaataacagctatccaaataatggctggccttggattggctccctggaagaggggagagaggctgccacatgttatcaactaagttattttcaactaagttacctcattagacgggaagacatgaaatactgcatcctctgtcagaaccaaaggaaacatgccttgagtagcaccactgtaactttatagactctaacacacacttttctataatctaattcagatggccctccttcccctctgcaaaggtgtgggctagatgtcaaataagcaaaatgctttggaagagagagagggttatcatctccgtgcatgtcacagtcataaggccactacaatttaagaaattggtatcaggccaggcgtggtggctcatgcctgtaatcccagcactttgcggggccaaggtgggtggatcatttgagcccaggagttcaagaccagcctgggcaacatggcaagacatctctacaaaaaaatacaaaaattagttgggtgtggcagcacacgcctgtagtcccatctactcaggaggctgaagtgggaggatcacttaagcctgggagactgaggctgcagtaagccaagatgatgccactacactccagccttgggtgacagagcaagaccctatctcaaaaaaaaaaattcaaagttttaacctacaactgagagaataaactctgaattgaatttctgattataccattttctcgcttttaatttgtaataataatgttcacatttgagtattaattctaaaattgtttcatccctcggatatggggaagacagcatcttttttttttggaaacggagtctctcactgtagcccaggctggagtgcaatggtgcgatcttggctcactgcaagctccacctcccgggttcatgccattctcctgcctcagcctcccgagtagctgggactacaggtgcctgccaccacgcccggctaatttttttgtatttttagtagagacggggtttcactgtgttagccaggatggtctcgatctcctgacctcgtgatcctcccgcctcggcctcccaaagtgctgggattacaggcgtgagccaccacgccaggccaagcatcattttttaagaagacatcacagcttcatagcatagtgagcttcactcttgtttcttttacctctttccaccagtgtcctctaacatttggaataacacttagccattgttgatacaaagcccccgaaactaaaacggttttatttggtctggtctctaacaaagggctgcttcaaagaggacagtgccctgtcaccatctctgggtccagatttatattctgctactggtttgtttatactgtagctaaaaacacacaatgcagaatatatgtacaatggaataatattcagccttaataaggaatgaaattctgacatatgctacaacataggtgaaccttgaaaacattatgctgagtgaaataaactggacacaaaaggacaaatgtacaattccacttacatgaggtacctagagtagtcaaattcatagagacagaaactggagtggtggttaccaaggagaaggggaaatggggagttgttcattaaaatgagttttaatttggaatgatgaaaaagttctggagatggatagtgatgatggtcgcgtaacaacatgaatgtacttaatgccactgaattgtacacttaaaaatggttaaaatagccaatcttatgtatattttaccacaatttaaaaaaacaacggccgggtgcagtggctcacacctgtaagcacatcactttgggaggcccaggtgggtggatcacttgaggtcagtagttcaagaccagccaggccaacatgaaaccccatctctactaaaaatacaaaaatttgccaggcatggtggcacacgcctgtaatcccaactactcaggaggctgaagcacgagaatcacttgaacccaagtggtggaggctgcagtgagccgagatcctccactgcaccccagcctgggcaacagagctagactctgcctccaaaaaaaaaaaaaaaaaaaaaaaccccaacatacaatggacccaaagtgacccactcatttcatcagtgaactacatccaaaataatatgaacagtcctagaaatgaacacataaaaaagataagtattttctacagtaagaacagacatcccgttcaaagagttcataagaatgacatcacaggaaccaaagacaattgaatatttattccccctccctcaaatgcaccaagcaagcatgtagcttagtgttttatatttagtaggtattcaataaacattaccaaatatttattttcattctgataagaaccagaaatgattttaagaaaggtaatgctaacctcttaattttttttctatttcttgctattgtgctggctgggccctttcaaaaaccctgcatcattccctgcctgacccaggacaacacatggaagtattccagtcccactgcaaagaggaataacctgtgaacatgaattcaaaagagagcaaaggtattttacagaccagggaaggtgcatcttcccagaatggatgttggcttctgccaaaaatcagtcaatttcttgttttgcagttccatgttaacaatggtttcacctcactgacagccatatcttcagatgctctcattagtgttttaagacttcactgtccaggcaaagtaacacataagacacatttaaaaattccaaggaaaaaatttggtgaaacacagcttagatttgaatcttcctttccctcaccccctaaatagactgaaataagaagctacaacaccaaactgaagcatttcaaactgtactttttccttatatatctgatgctctaaggaactgcccaatcacctgtcagaagtctttcagatcctttaaaacatagtatattgcttttctattgctgtcaaaatatgaaaagcccctaataatcttctgcaatctcctatttttatagcttttcatcatcaaagaagggaggcagagccatatcttatcactaacaaagcaccatattctagcaggatgtcttgtcacaatctccttcctaaactttcacatttttctgacattcatgctaattgtaaaattagcaccatttacttgcaagttcagtgcactttatttttcattcaatattttttattaataccttctgtaataaggcataaatgaagctgccttcaaacaaaatcactgtccatgtttcaagttaatcagtgcataccatagagaagcacagaattaattttggatgtattttgaaataaaagaaagttaaatgtaaatgtaagctcattattatctttatcagctgagtcttgctatgtgtagtaataaagctgcaatcaaatttaattgagaaatgaacttgaaagattgtgagtatgagctataggtatattcagtttgcggctctcttttcttgagttgagtaacctaattttaaaaaagaaataaatggctgggcgtggtggctcacgcctataatcccagcattttgggaggccgaggcaggcggatcacgaggtcaggagatcgagaccatcctggctaacatggtgaaaccccgtctctactaaaaatacaaaatattagccgggcatggtggcgggcccctgtagtcccagctactcgggaggctgaggcaggagaatggtgtgaacccgggaggcggagcatgcagtgaactggatcgcaccactgcactccagcctgggtgacagagtgagactccgtctcaaaaaaaaaaaaaaaaaaagaaacatttgctagaaatgaaaataattagttaaacagaaattcaataggattgactgttgttaactatatctttatgacataattagtttatcttgagggcctattaaataaatgcatcatatttaatcataaagcaaaattgtgttgggtgaaataaaagaaaaactaaactctaacctctaagacaggagtcagcaaacttttttttttaaaggccaggaggccacacggattccaccacaagtacacaactgtgccaaatggtgtgtaagtaaatgagctgagctgtgtttcaacaaagttttacttatttggatttcacataattttcacatcattaaatagtacagtattcttcttttgatgttttttcaatcattaaaaaatgtaaaaactattcttggttagagggccataaaaaatacaggtggtgggccacgtttggccttcaaacagtagtttgccaagtcctgctttaagagtttattatatgaagtacaaggcaaaaaatatcccctctggcaaatctagtgttctattgatgcataagaaaaaatctttttcttctctccttccaaaatctgatgtctgtagaaaacagttccaaaaaagtttcctgagtgcctgccaggtgcaagacacattgctaagcactgagaggcacctaagaggtctctgaacaatcaaagtagggagaggggggtagctgagagatggagagagctctattgatttggacagctcttaccattaaggaagaggtagtatctgtattggactttgaagaacaagtatcatttgaatacagggagactgtagtaaaagaaaaacacagagataaggacaaaaccttagggaatagacatattatggagtgaattttttaaaaagtagctccagagtcaggaagaaaaccaggagagccagctgccactgaagccaagagaagaaagcatttgaaggagaaaagggcttaacactctcagtgcagatactggggaaaaagtaaaagtaggtcaaggcactgaacaaacaggggctatcaatgactttttacagtgttgttttggtataatggtagaggtggcagacaggttggagagaataaatagggactagtctgaaagggacggtggcaggaagaatggctttatagtgtttattcagactagagaaatgggttctccttccttaaaacaaaaaacactctcatgaaagatgcagctactttcttagtaaattgctctaatatgaaacactctaataagaaagttgttctttataccaattaaattcttacactctttgaaatcaaatggcccaatttatgtggtaagatcaacagttaataaaaggtgcatctatcgtaaacattgcaaaaagacacagccaagaatcaacaaacttttctggaaggtgctatataaacacacgtacaccccaaatggttaagtgtcctactaagctcctaagtgtatgcctgtctgtccttctttcttcataaaattttttatttcaacatagttttacacttataaaaatgtaataagaatagtaaaaggaatcctgaatagttttatccttccttcttttttaaaaacctacttcaagaaaagcattctttggctgaacttcctgctttttgttctttgtaatgtagatactgccattaaattttggccatcagtttaaaaactgttaggactcaagtagtttagttaatgttgtccatgattcagtcacaagttgtaagaaagcaaagtacaatataagctcacttaacagagttcctgtttaaaattcattgggcttctttaatcttcagattgatgtttttcaccaaccatgccccattctctccttctgaggttccaattaaatatatgttagatcttctcacttactatcctgaacgttttgttctctttctgtaatttttatctctgtctatgcatcattctacataatttcttctgatctaacttccagttcacgatttccctcttcagctatgtctaatttgctgctaaacccatacactgagctctttatttcagttattgccttttatagatctagcatttctatttggttctttttcagaactgttatattggtttttctttttaatagttcccaattctctgataaaaattttaagcttgccagccaggcacagtggctcatgcctttaatcctagcacttgggaggccaagacaggaggatcacttaagctcagaagttcaagaccagtctgggcaacacagtaagaccccatctctatattttaaattttttattttctgcaatggagtctcactctgttgcccaggctggagtgcagtggcatgatctcaggtcactgcaacctccacctcccaggttgaagcgattctcctgcctcagcctcccaaagtgctgggattacaggcgtgagccaccatgcctggctttttaaattttaagaattaaaaaacaaatttaagcttggctttgatttcttcgaacacagtaagcatagttgtttttagtccaagtctgataactctagtatgtcatatatttatgagttttataagtctgtttgcttattgtgactggtttcctcttatgtctaatcatctttgactgtgtattggccacttttggagaaaaagttccctggaggaatatttttaggcagagggtgatggtaccttcttccagagatttctgtttgctactgccatatgcctggaagcactaccagttcagagcctctttcatccaagatcaagaccttagggtctatttcctccttttagaacactaatgttaatttttgcactgattgagaacgctctttgtcatattttcccctcatattttctctttgccatttgccagagatttccttgactctttcttccagtctttgattaaatatgcatatatgtgagtgcatatatgtaatctccaaggaccctctcattctctaattgatccttttaaataacatttttactttccaaatgattcttcaggaagttgcatatctgtttcactaacaattgtctacttcacatgattgtcaagaataatgtcattgctttcaatgctatatataaaagctattacaaaatattagtatggccaactgaactgcagtttgtgtattagctttaaaagcctggagaagaagtgacatctgctagtgattttacttaaacaatgttaaaatatccagtcatagaaatataacgtattaaaaaaggcacaagagccatggtgaaaatcaagggacaataactttatcctaaattccatttgctgttatatatcctgctataatagtgcaatgggacatttagcaatagataatcaaggaaagactttctgagaaatttgagttttgagaaaaaaatctaaagaagagccaagtgactaagcaaataattttcggccggacatggtggctcacgcctgtaatcccagcactttgggaggctgaggcgggcagatcacaaggtcaggagatcgagaccatcctggctaacacggtgaaagcctatctctactaaaaatacaaaaaactagtcgggggtggtggcacacgcgtatagtcccagctacttgggaggctgaggcaggagaatggcgtgaacccgggaggcagagcttgcagtgagccaagatcgtgccactgcactccagcccgggtgacagagcgagactccatctcaaaaaaaaaaaaaagaaaagaaataattttcaaaaacagtatataatatggctgaatattgaatcgaataataaaaatggataataaaaagaaacaacgttttcttcctcaaatgaaataatacactttctggctgggcatggtggctcacgcctgtaatcctaacacttcaggaggccaaggcgggtggattacctgaggtcaggagttcgagaccagcctgaccaacatggtgaaaccccgtctctactaaaaatacaaaattagccggtcatggtggtgcacgcctgtagtcccagctactcaggatgctgaggcaggagaattgcttgatcctgggaggcagatgctgcagtgagccaagatcgcaccattgcactccagcctgggcaacaagaatgaaactccgtctcaaaaaaaaaagaaaaaaaagaaaaagaaagaaataatatactttctaaatgctagtctccctttgcaagcattaatatctttttttaaaagctacaagacttctagtttccagtctagcattaaggacttcggaagtcgccactccatcctaacaagggaaaagctgaacagactgaaaccttgacaactcttcataggtctgtcagaagactgaggtcggggacaaattgctgcccccaaaactggagacacacacaggtggatacagagaatcacaagggagaagaaacccacaggagaaacctccagagagtggagtaacctaactgtaattgacgaactgctagaggctgtgtggacaagtctaagagttagaaactccagggaaccacctcaccaaaagtttttgtaattttacctccaggagctctacttggcctcctgcttccagcagggggaggaataaaagaaccattctgaaatatgccagaccactttgttcttaacaaggcctgccctcaggagaaactattttaccagagcctaacctgctggggttttatgaaagcttaacatacctaggggaaggatgatatccaactccagccccctctagccatccacagtggggaagagaaatatccagccctagtgggcactaaccttccatgtgtaggaaccccacctcagctccctccagtcttccacataggggcccctctaaccatcctgttccacctaacgggggtgatgagaagcataggtgatattcacagtccagtggcacaagctcaccaaaagactgagacctaatcacagaattacagaacacttcccctccgtccaaccttaccatcacacaacagtacatcatgtccctttcacccagtacatcacgtccagattcaacaaaaaattactacaagacatagtaaaaggaaaaaaaaaaaaccaacacaacacaatttgaagagacagggcaaacatcagaaccagagtcagaaatggcaggcgtgctggaattatcatactgggaacaactatgattaatatgctaaggactccaatggataaaggagacaacatgcaaggacagatggataatgcaggcagagagatggaaattctaagaaagaatcaaagagaaatactagtgattaaaagcactgtaacaggctgggtgcagtggctcacgcctgtaatcccagcacttttggaggccgaggcaggcggatcacctgaggtcaggagtttaagactggcctggccaacatggtgaaatcccatctctacaaaaattagccagatatgatggcgggtgcctgtaatcccagatactcgggaggctgaggcgagagaattgactgaacccaggaggcggaggttgcagtgagccgagactgcaccactgcactccagcctgggcgacagagtgagactccatctcaaataaataaataagtaaataaataaataataaaaatactgtaacaaaaataaagaatgcctttgatgggctcattagcagactggacatggctgagaaagaatctctgagcttgaggatatgacaacagaaacttcccaaactgaaaagcagagaacaaagactgaaaaaacacaacagaatatccaagaactgtggtacaactacgaaagatataaggtgcacacaatgcaaataccaggagaagaaaaaaaggaatggaaacaatatttgaaggaataaagactgagaattttcctaaattaatgtcagattccaaaccacagatctaggaagctcagagagtaccaagcagaataaagaccaaaaaaaaaaaaaaaattgtacctaggcatatcatagtcacacttctgaaaaccaaagataaagaaaaaatcgtgaaagaagccgaagggaaaaaacaaatacttttcctatatagaagccaagataagaattacatttgacttttcctcagaaaccatgcaatcaaaaagagagtggagtgaaatactgttgagagaaagaaactccatcaacctggaattctgaaccctgtgaaattatccttcaaaaaatgagggagaaacaagtataagcgatatgctaagaaagaagagaaaaagaaattatatataatgctcaaataaaccaaaaaaggcagaaaaagtgtgggaggcaaaaatagaaacaaagaacaagggcaacaaatacaaaacagtaacatatataataaacattaatccaactatattaatcaataatcactttaaacatcaatggtctaaatacaccaattaagagacagagagtgttaaattaaaataataataataaagcagccaaacaatatattgtctataagagaccgactttttatttattcatttattttgcgacagggtcttgctctgtcacacaggctggagtgcaatggtgcaatcatagctcactgtagcctcaacctcccaggcacaagcgatcctcccacctcagcctccaaagtagctgggactacaggcgtgcaccaccatgcccagctaatttttttaattttttgtagagacagggtcccactgtgttgcttatgctggtcttgaactcctggcctcaagtgatcctcccacatgggcctcccaaagcgctgggactacaggcatgaggcattgtacccagccaagagactcactttaaatataaagacacacagagattaaaaataaagggatgtcccagcatagatgggttcttaaaaaaaaaaaaaagaaaagtaaataaagggatgaagaaagatataccattctaacactaactgaaagaaagttgagtagctatattaatttcagatggagcaaacttcagagcaaggaaagttattatgaataaagaggagcaatacataatgataaaaagatcaactgtccaagaagacctaacaatccttaacacatatgtgcctaaaaacagtgtcaaaatacatgaggcaaaagttgacagaagcaagaagaaacaatgaactcactattatagttggagactttaactaaccccatgtatcagaaatggacagatccagaaggcataaaatcagtgaggatatagtagaactcaacagcactaccaactgactggatataattgacatctatagaatattttatccaacaacagcagattacatgttcttctcaggctcacaggaaacactgactaaaacagatcacattctgggccataaaatacgctgtaataaatttaaaagaatagaatcatacagtgtctgctctcaggccacaatgaaattaaacttgaaagtgataacaaagatagcaggaaaatcccaaaataggtggaaattaaaccacacacttcagccaggcgcagcggctcacgcctgtaatcccaacactttgggatgccaaggtgggcggatcacaacatcaggagttcaagaccatcctggccaacatggtgaaaccccatctctactgaaaatacaaaaagtagctgggtgtggtggcacatgcttgtagtcccagctacgtgggaggctgaggcatgagaattgcttgaacctgcaggggcggaggttgcagtgagccaaaatcgtgccactgcactccagcctgggcaacagaaccagacgcagtctcaaaaaaaaaaaaaaaaacccacacacttctaaccaacacacacttctaaccaacaaaaagaccttagctaccacacccttagctgggtgtggtagctcactcctataatcccaacattttgtgaggctgagtgcttgagcccaggagttagagaacagcctggataacaaagtgaaaccccatctttacaaaacaatttaaaataaaaattagccaggcatgacagtgcatgcctgtagtctcagctacttgggaggctgaggtgaaaggattacttgagtccatgagttcgaggctgcgatgagctatgattgtgccactgcactccagcctgggtgacagagcgatgaggccctatacctaaagaaattaaaaattaacttttaaaaaagaaacttcaagagagatttaaaatattttaaggtaaatgaaaatgaagatacaacttatcaaaatttgtaggatacatcaaaagcagtgctcagagggaaatttatagtatttagtgcatgttagaaaagaaaaatgatataaaatcaataatctaagcttcttccttaggcaactagaaaagtaagaacaaattaaatccaaattaagcagaatgaaagaaataatttaaaaaatcagagcagaggctgggcgcggtggctaatgcctgtaatcccagcactttgggaggccgaggcaggcagatcacaaggtcaggagatcgagaccatcctggccaacatggtgaaaccccgactctactaaaaatacaaaaaaaattagccaggcatggtggcgtgtgcctgtagtcccagctgctggggaggctgaggcaggagaatggcatgaacccgggaggtggagcttgcagtgagccgggatcgtgccactgcactccagcctgggcggcagagcaagactccgtctcaaaaaaaaaaaaaaaaatgagagcagaaatgaaaataactgaaaagaggaactcaatagagaaaatcaggagtgaatcctaatgtaaacggcggaccatgggtgatgatgtgtcaatgtggcctatcgattttaaagatgtaccaatgtggtatcagatgccaatagtgggggaggctgtgcgtgtgcagggatgggggcatttgggaacactgtactttctgctcaattttgctgtgaacctgaaactgctctaaaaaataaagtttattaaattttttaaaaagtgaccgcatagttctaaatctcaccccccttctctgtcctctagaaaaaaaaaattgaatttatcttttcaacactcttctaatacttcaaaacaaaatattcattcaaaacaagtctctcccctgagagtgtttaagaagttaattgtgctttcgttcccttaggacagactgactaaagagtctcccgggaggagcatgggaggcaggctccactctttgaccttggtagtagtcacattgttcattttatgactatttgttaaacattaaatgtacgtctcatgtacatatataaatatacacatatatatttcagcaaaaaagaataaacagtatttttaaaagcttccttcataaaaatgtctctaagtaaagcaaactaaataaagatctcattgaaatttattcattataattgcccttttaaaggctctgaagaacagagatgggacaaaaccaaaactgaatgaaatacttgggtggctcattcacatctttcaagaaaagtctcaatgtggctagagatttaaaacatattttcaggggaaagtatttaaaattaatacagttagtttagtactgccagtctcttctttctctaaattaaaagattcttatatataaaatagaaaaggtacaaattcatctcccttttacatggcttatattttccaggatttctaagtgtctaaagaaatggcacttttacactatcctctgactttagacctatagtactttccattctttcccaaatatatcactgtgcctttatttgtaccatatcaccttctctgatgagtacaacctagggctctaatgcctcctcttcactctgcagtcagaagctatgcttttgaacagttaacattgtacccctggttcaatctgctgagagcacaatcttggaatactgattctattgcttaagaccccaaacagactgtcattacctctctccccagaagctggcaattaatgaccattttacttctagctagtgagggagcatttacttccaggcagtgtgtctttaggtcagcatgatttctccaattataaatttatcactgcctatggctaaacaaacaacatctttttttttttttttttttttgctatctcttagattagaaatggatactctctgaggggacaccatcccattaatttggcctaggtcttcttcactcatgcatcctccttttggagctatctggcacttttccataaaaaaccaccataaccaaatatgtttgttctttttcaggtttgaataacacaggagaatgattctagttgtcagttcttaattcaaagtctttcttagggcaagactttcttatttttaactaggaataaccagacactagtatattacagctgcaacaactctcaaaaaagctgtacaaaagaaaaatgtggcttccatctgcaacagtcattaaagatttcttttttcttactaaggctcccagaacacatattataccaagccaaaagaaccaattttcttcatggagtagaatagcaattggctgttactcattaaattcttacagcaatgagcaatgactttctttcttgttttgtttctctttgaatagtagatgaagttgattttttttttctaaggctgcctcccatcaccagcattcctgatccttggcctatgcagctgttaatatgctgcacacgtatgcctgggctccttaacaaccaatacagttaacctttctgtttactccaagtcagttcctatcttgttagtgaaattgattttttttctttctaagcataataatttcatatcatacaaaaactatatatatgaagttcactggttttctaaatcctgtttttattttaagggcttcaggagccatggattctcatgttttaattgagaaagacgtgtccattcatggtaatgccaaaaggtgggtggactatggctacttcacaagcatatttaactgcctctgtgttgggggtgggaggtaactgttggagcccacatttacttttattttaaaaaagaagctaattctcttgattgaacataggtgaaagattatttttctggaactagtgattaaggagtaaaatattaaatactatactaaaggatacgtcatcataactatctgtggtcaaaggcacttgtccataactcaccccatggtttttatattctaattgtctattaactatctgtacccctcacggactggaagctcctagaaggcagggattgtatcataatgactgtttcatctttaaggcacatagtctggcagatggtatatagtcaataagtatttctgttagtgttgatattatattcgatacaaaaatctaattattaactagctacggttttagactaattggcacactcactgccccaccattaatgaaacaagctttaattggccattatcccagatcaggcagatatgcccaacttcaaatatctaatggtctctacctaaacactgggcatctttacgggaggcagcagaaaataatgctcaatttgtgagttttgagtctttcttttctgattcagattctgctactaactagcggtacctctggcaagtcactttaccttagtagatttcatgtcagagattaaagtggggaattggactaaatggtctccaagaacctagctaggtccagctctaaaagtgattgggcttgaattaataagggtattactgatatagcaagtccttgtcaacaccagagggagctacattcatatcatcactggggtggttcagaagatttcagggaaaagcagttaaattgaaaacttactttccagaatgagagaaattctatagcaaggtaagagctccacactgctcatacggccacccaacaggctctctgccatcaccccactcttacagatgtcaaagcacctcacacctgacttgtaccaacacacaaggcttcagttttaattccatgaaaacccagttggctttgagccattcctaaagatttctttccccattcagtctattttctttcttaaccaaattaacaacaacaaaaagcaaagtaattcattgtgatactggaaaatccccaaagaagggagataaaggaggagaaagattcatatcacaccgaagctgtagcctggaaaaaacagtaaagttaactacaactgaattcattagcagcctgccactcaaacccaaagctacctcaaaaacaagaaaactactcaaaaagagaaaacatatcaaggaaaggaaggactcagcatagctctgcaatgcaggtgcgggaatgcctgagacgatggctgacactgccctattgggctccatggtaagcagtcacagctgctgaagagtgatgtcattaattaaagcaatggggtcacattaggcatttggcaaaaaaactgtaaagagacaacataagggaatggagggtggaatagggaagaaaaagtaaaagcatttctaaagctaaagcctattctgacgttatcatatactccctcctccacctcagcaaaacacccatagccttgaaaatgacctaaacccttacagagcaagtgaaaagaagaaatgaaaacctctccattagtatcaacttatgtttctctttgtccagaggaacaatggcatgctaacctgatggagaaggcataaatcatgaatattacagaagggtagtctgttagagaaagacaaatgtaatcctgaagaacccctttacttacatttcatagattaattcaacactcagaaaggcaaagcttcaatggtcaaaaatggaccatctactttttaggacataggctgttcctgagtaaaaatggcttataaagccactgcagagattgactttgtgggtaaagagaaaaatctactaaaacaagacaaataattattttccacttaaaaaaaatgcaagctcaaacctcataagtacagagtaaaacttaggttgaaatcaacttatttctatgaatccaagtggttggaatacctaagggtttctttttttttttttttcctaagtgtttcttatatcaccaatttcaggcagggtgcagaggctcacacctgttattccagcactttgggagacagaggtggcaggaccacttgagcccaggaggtcaaggctccagtgagcagtgtttgcaccactgcactccagcgtgagcaacagagcgagacactgtctcagataaacaaataaacaaacaaaccaccaatttcaaatactctagaagtgccaaagccttaagaggaccagctacttttcctctctttccctttagataattaaaaaaaaaaagtatgagaaaaagtatgaagaagtatgaagaaatatacggagaactacttgttttcctgccttatttaggacatgtgccaaaggatttccaattcactctgcttcatactgacctttaaaatatttcggccatcaaatgattctctttccttgaagatatatttgccttccgctgtgtagagattgtacctgccttcagctgtaaatattccaaagataatgttagaagcttagattgattggttgttttctcttggatttctataggtacataggtacgactagcaaaattttcatgaactacctggaaagtggcataatgaagaggaaaaatgtcaggctatgaatcaagagacctggcttctagtctcagttctgtcaacaattcattcagtatacatttattcattcatctattcattcgacattctccaggcactcactatatattcctaactatgcaactagctacattattaggcaaattatgtctccattgtggaccttagttcctcattgacaaagtgagaggcaggactaagtgatcttcaaaggttccttatgttctatagatccaagaaaagtggcatataattttaaatatgtaaaaatacataagagttcacacattagctagtcaaaactcatgctctgggttgatttaagggcttcccccagaggaaaaagagcccttcagttgcaatcaaaggtatccttacagatattctacacaggaatgcagcaaatctatgaccttagcctaaaccaagctgtgctctagcttcttaagttaatttgggttgcatatctcaaaagacatccttaaaggttggcaaggaaaagaatatcaaaagagagggaaacaggaaagaaaaaaaatgtaacatcatttcatgtccttctcaagtaaaaattcaatacaggagagtccagagtacaaaaaattcaaagcatcctcaagaattaactcagaatattttctgaaatattaatcatttcctacccactgacagaccttcaaaaatacttatttccacatttaagtacgttattttacttttataagtaaggagggtactaggccagaattgatgaaatacatctagagttttaaaaactccatgaacataatacataatacatttcagctagcccactggagttgcacatgggtaactatggaactatgtctctaatgagaaggatgctcttaatcaaagatcccaaccccgtgcatatttcacaacttaaaattaagagaaagagaatgtgtgaagttgcaaaagaacaacaaataaattgataccaaataaatatcaaaaagtggaaacaacacaaatgtccaccaattgatgaaaggatacataaaatgtggcatatccatacaatggaatattattcagccataaagaaatgaagcaccaggcatggtggctcacgtctgtaatcccaacactttgggaggctgaagcagaaggaccacttgatcccaggagtctgaaaccaacctgggcaatatagtgagaccttgtcactataaaaaaaagtttaagccagacatggtggctcatgcctgtaaccccagcactttgggaggccgggacaggtggatcaccttaggtcaggagttggagactaactagcctgaccaacatggtgaaaccccgtctctactaaaaatgcaaaaattagccaggcatggtggcgcacacctgtaatcccagctactcaggaggctgaggcaagagaatcacctgaacctgggaggcggaggttgcagtgagccaagattgcaccactgtactccagcctaggcaacaagagcaaaacttcatcttaggaaaaaaaaaaaaagtttaaaaattagctgggtgtagtggcatgtgcctgtattcccaactactcaggaggctgaagtgggagaatcatttgagtgcgggaggtggaggttgcagagagccaagatcactctactacactccagcctgggcaacagagaccttgtctcaaaaaaaaaaaaaaaaaaaaaaaaaacacacagaaaacaaaacaaaaaaaggaataaagtactgatgtgttataacatggatgagccttgaaaatattatgctaagtgaaagcagccagccacaaaagatcacatacagcatgattctgtttatatgaaatgtccagaacaggcagctctatagagacataaagtaggcaagtggtgcctagggcttggtggaggtcaggggagggcagagtgagaggggtaggaagaaatggaaagtgactgccagtgggtatggggtttcattttagggtgatgaaaatgttctagaactgattgtggtgatggctatacaagtttaaccagactaaaaaccactaaattatatatatatatcaagagagtaaattgtagagtatgtgaattatatctcaataaagcaattatattttgaacatctgcaaatagagggataactagactgtaaacacacaacactctcttatataaagctctagtactaactgaatataaacctggatccacacaacttagaatatacagattcctacatatctgaactcttcctgtgttaagagattagttaatgatggaccatgacatagttttaagagctctgaacaaatatttaaggactaagacaaatggaaaatgtactgatagctaataaatgtctaataaaatactgtctatacctgcaacgcccaaaacagtggccactatccagatgttttcccataaattttaattaaaattaaaaataaaagttcactttcacagtctcactagccacctttcaagtgctcaataaccccatgtgtctagtggctaccatattggacatcgcagatacagaatacttcaatcatcacagaccgttttcttaatacagtatgtcttctgaaacaataaatttagagtatactccagagttctgaaactctgcctttacataataatgttaaaatgtacatcatctcaggggattctcaatttgttttccaaaattaaaatacactgttcagaataaaacaaatagcacaaacctagttacatgcttctactggacaagctgcattataatacatagatattgaaaatattcctacttcctgtactactactccccgaaggaaagaaatatgctcaactgggccgggcgcagtggctcatgcctgtaatcccagcactttgggaggccgaggcaggtggatcacaaggtcaggagttcaagatcagcctggccaagatggtgaaaccctgtctctactaaaaatacgaaaattagctgagcgcggtggcaggtgcctgtaatcccagctactcaggaggctgaggcaggagaattgcttcaacctggggggcggaggttgcagtgagctgagatggcgccactgcacactccggcctgggcgacagagcaagactccatttcaaaaaaataaaataaaaatacacacacacacacacacacacacacacacacacacactcaactggaacaagttcaaagttttggattctattacctacccaaacaagagtatataggctttaactgagttatttgaagctctcttaatctcagtgttctcaaaagtaaaatagagatttatttataagtcttaaataaaattcaatatggcatcacaaaatagtagtattttagaactaataactagatagctacaaatttcttggtcctaccatgactgtaactaaacggggttaattatcaaatgattgccagttgggatctttggtacatatctgagagaaattaaaagacgtgccttaactaaaagggacacacaaattgtcctaactaaaaacctacaaatagtcaatgattcaagtcctgatggagttatcttctcctctagatagattttttttttttttttttttttgagaaggagtcttgctctgttgccaggctggagtgcgatctcggcacactgtaacctccgcctcccaggttcaagcgattgtcttgcctcaacctcccaagtagctgggattacaggcatgtgccaccacacccggctaatttttgtatttttagtagagacggggtttcaccatgttggccaggctggtcttgaactcctaaatgcaagtgatccacccgcctcagccttccaaagtgctaggattacaggcatgagccaccgcacctggcccccacctagattttctaaaaccaaggtcagggctcaagaaaggaaatgaaaccggaatacgtgaccttggtgctgctagtgtattttgaaccacgagtcttggaaggaagagctgcatatggcttgaatgtgtgactcctgatccgatgctgaaggtactagagaagctttcactttggagatagggacaggaagaaaagaaaacttctttttgaaataaacaactatcccaaatcaaggattaaaacaaggcatttttataaaaaggctcagagtccatgaagaaaaaaactattattttaacacaaggtttctcaacctctgtgctacgacattttgggaagaataattctttgtcatgggggaccgtcccatgcattgtagagtgttagacagcacccactaggtgccagcagcaacccatctccagctccctaactatgataaccaaaaatgtctccagacaatgccaaatgtcatctgggggcaaaataacccccagttgagaaacactgatttaacatttactttcactagctcaccttcctttcttttttctctttaaaaaaaaaaaaagccaccaagtattgcatgcgacatacttatgccaaaaatttattcactgtttatataaaatttaccagagcatcctgtatttgtatttgctaaatatggcaatcctatgtgtgacagaaataaaagatctggaagccacagttccatgctatatatgttcttgcccacctctactatgctcatcagaataagctaagaggtctaaaaaagaagctatatcagagattctttgatagctcattctacctaaacctcagagatgccacaaggccgctgatcacaaactgtgctatagttctctgggggacttaccattggggtctttcctgaatagtgtattcataactgtagcatgcagtttcacactattccactctttcactattagtccagatgcctgaaaacgttccagcactcgatcaactaattcttgtagcctggagaaattggagaaaagtaatgcagaaatcttagtaaacttctgaacatgcgattaccaattcaacaatgtttatggagcatgtgctctgtgctaatcaccatacaaagccctgcatcacaggaggaagaataagagactcatctcccaccatcatggagctaaagatcagtcttgtttgtctgcttaacagatagtagaaataaatgatggcaatatattatggtgagcgtgaagggagtgatcaactctacatggagagggccaggtttccacaggaggtttagacatagtctggaatgatcattaaagatttgcaaataacaccagggaaggaggggcacttcaagtagaagaagaaacagcaagtgcaaagatgccaaggcatgcaagatcacagcatattcaaaaaactgtcaattatttacaatacagttatgacagagagtgacagaaaagggacaatggagatgagctaagtctataagcagtggtcagattagggaagccacagaaagactttcaaaagggaattatgtggtctgatgtccatttttgaaagctgactcaatagcagagtgggaagggctttagaagaggaacagctacagaggtcagtcagctaggtggctacttcaacagtcaacatcactatgatgtgtcaggcacagttctaagcactttttatctgttaaatcatttaatcctcataaccaattattatccctatttaccaatacagaagccaaggcacagagaagttacaaaacttgaccaacttcacaaaactaagtggcaaatccaaaattagaaggggccgggtgcagtggctcatgtctgtgatcccagcactttggaaggctgaggcaggctgatcacttgaggtcaggagtttgagaccagcctggccaacatggtgaaaccccatctctactaaaaatacaaaaactagccaggtggtagtggcgcgtgcatggtggctcacacctgtcatcccagcactttgggaggccaaagagggaagatcacttgaggccagaagttcaagatccacttgagcaatatagcaatacctcgtctctacaagaaaaattttttaaattagctgggcatggtggcatgcacttgtagtcccagcaactcgggaggctgaagcaggaggatagcttgaccccaggagttcaaggctgcagtgagctgtgattgtgccactgcactctagcctgggcagcagagtgagatcacgtctcttaaaaaaagaaaaacaacaataacaaaaaacaaccctcggtttcctatggtcttccaagtaagagtccaatccttcctgacccatgtggccttcacagcttggcttcagcctgcctttctgtttcattgctgcccttccctttctatagattttctccagtccttgaatgtattatgttctttgatattgaatctctcaattacttaggacaaacattgttttagaatcaccttcacttctttgactcccttataccagggcatctcacttctcaccacttccagtgccactgtcccagccacctgggaaccagcaaagacaactgataaggatgaggaaataagaacaggaagacttcagagaggctgaaatgagaattacaagggggaaaaaaggaataaccgtacagtacaacactcgagaaaagaaaaaaagcaaaaatatgcctccttgtttctcacaattagagtcctctatcagagcagttttgctagcacactggggatagaaatcttctgacggaggagccagagaggagggaaggcaggaagtgcacataactctgtcaagaaacttgaaaggaaggagagaaacgaatacctggggaatctgaagatacagagttgagtgagggctgtgtgtgttttcaatgaggagaaaaagttgcaaacgcttactgacaagaaattatccaacagagaaagaaaaggaaaccaggcaataggggaaatggacagaacaagacctcaaaggatggtgtgttcacaggtgataggaacacagcagtgaacaaaacaagccccacccttgtgcagctcacattcaggtaggaggaatgaacaaacacacacgcacacctctgggtgccacatgccttgaaggagatgaaacggcagagagggagtagagtgtgaatgggggtgggggcactatgttaagtagagtgatcaggaagggtctccctaataaagtgacatttgacagagacctgagggaaaagcattctggagagaggaaacagcaaatacgcatttctgagacaggcatatgcacagaaggactgaggaatagaaaggatgccagtgtctgcagtgaaactaggaagagagaagtgatgaagtcggagaggtgtgaccaggttagctgaagctctcaggcccatggaacgacttcagtagttacagagtgaggtgggagcttttggagggtgttaggcagaagactgacatgatctggctgctgtgtggaggacagacagcagtggaggcaggacagaagcaggaaggcagttaggaggctgtggcaatcacccagatggctgggacagtggcactgtaagtggtgagaagtgagattctctggtataagggaatcaaagaagtgaaggtgactctaaaacaatgtttctcctgagtatttgagagattgaatgtcaaagaacacaatacattcaaggactggagaaaatctgtagaaagggaagggcaggctgaagccaagctgtgaaggccacatgggtcaggcagcattggactcttacttggtaagccataggaaaccgagggttgttttttgttgttgttgttgttgtttttctttttttaagagacatgatctcactctgctgcccaggctagagtgcagtagcacaatcacagctaactgcagccttgaactcctggggtcaagctatcctcctgcctcagcctcccaagttgttgggactacaagtaaatgccactgagaggttaagccagctggacttcctgggttgaatgggggacttggagaacttttctgcctagctagaggattgtaaatgcaccaatcggcactctgtaaaaacgcaccaatcagcgctctgtgtctagctaaaggattgtaaacgcaccaatcagcactctatgaaaacgcaccaatcagcgctctgtgtctagctaaaggattgtaaacgcaccaatcagcactctgtgaaaacgcaccaatcagcactctgtgtctagctaaaggattgtaagcacaccaatcagcactctgtaaaaatgcaccaatcagcgctctgtgtctagcttaaagattataaatgcacccatcagcactctgtaaaatggaccaatcagaatgggccaatcagcagggggatgtgggcggggccaaataagggataaaaataaaagctggccacccaagccagcagcagcaacccacttgggtcccccttccatgctgtggaagctttgttctttcactcttcacaatcaatcttgctgctgctcactctttgggtccgcactacctttatgagctctaacacaacgagggtctgcggcttcattcctgaagtcagcaagaccatgaacccaccggaaggaacaaacaactccggatgcgccacctttaagagctgtaacactcactgcaaaggtctgcagcttcactcctgaagtcagcaagaccacgaacccaccggcaggaagaaactccggacacatctgaacatctgaaggaacaaactccggacacaccatctttaagaactgtaacactcaccacgagggtccgcggcctcattcttgaagtcagcaagaccaagaacccaccggaaggaaccaattctggacataccaccatgcccagctaattttttttttttaactttttgtagagacggggtatcactatattgctcaagtaggtcttgaactcctggcctcaagcgaccttccctccttggcctcccaaagtgctgggacgacaggtgtgagccaccatgccaggccatcaatgacagtttttaagaagcaagaaacaggccaagtgcagtggctcacgcctgtaatcccagcactttgggaggccaaggcgtgcagatcacgaggtcagaagttcgagatcagcctggccaacatggtgaaaccccatctctactaaagatacaaaaaattagatgggtgtggtggtgcatgcctataatcccagctccttgggaggatgaggcaggagaatagcttgaacacgtgaggcggaggtcgcagtgagccaagattgcgccattgcactccagcctgggtgacagggcaagactccatctcaaaaaaaaaaaaaaaaaaaggaaaaaacataaggaaaaacgaaaaacaactaaaagcacggaaaccaattaagagagatgttgtgcttccttatatagttatcttaatctttttccccaattacaaaaataatacaagctcattatagaacatatgaaaaaagtacgaaaagcataaaaaggaaaacataacctcaccacgcagataaacacttaaccttttgtgttaaatgtatatctatggatggtgaggttacgtaatcagaaaaaattttcagataaactgcttttaaaagtttctgattaacaccatctaagaaccataatatttcttcttcttcttttttttttttcagagacagggtctcactctctcatccaggctagagtgcagtggcacgatctcagctcaccgcaaccctctgcctcccaggctcaagcgattctcctacctcagtctcccgagtagctgggattacaggcgtgtgccactgccaccggctaatttttgtatttttagtagagacagggttttgccatgttgcccaggctggtctcaaactcctgccctcaaacgatccacctgccttggcctcccaaagtgttgggattacaggcgtgagccactgtgcctggctgaaccatatatttctaaatataacttaggtctgaatataaccatgcaccgcaaattgcacttcagttacaaatcacaacagaataattcctcactttcccccttaatctcttgaagaaaaaaagtagacagggagttcagctatataaaactgaacatgaaacacgaagcatgaaatactggagtaagtaaactaaacagactacatgaaagaaatcagtttccacctttgtctttctggaaaactaggatttctgacaatttacagactcaaaactttgaagggactaatatcctttaaaaagttctagtgtaacctgctctttttacacagaaggaaatgatgcagagaggctgggttgctcagtcagtgacagaggaaccagaatccaagtctacaggcagcctgtgctgtttcctttttctttctttctttctttttttttttttttttttttttgagatggagtcactctgtcacctaggctggagtgcagtggcgcaatcttggctcactgcaacctccatctcccgagtagctgggattacagacattcgccaccacacccagctaatttttgtgtttttagcagagatggggttttgccatgttgggcaggctgatccactgacctcaggtgatctgctggccttggcctcccaaagtgctgggattacaggcgtgagccaccgcgctcggcttgttctgttttcaattcactgtgcactccacgaagactggctatttgtcttattcactgttttatctctgcacctaaactaatgcctaattggcacataatcagtgctcaacagtctttacatgcattcatgaatgaattcacagatagcaaatattttggaattctattaagagagcttaagggtacttggacataatcgttaaatttcaggttgacaatatgtcactatatttcttttttctttttctttttttttttttttttgagacggcgtctcactctgttgcccagtctggagtgcagtggcacaatctcagctcattgcaaccttcgcctcccaggttcaagcgattgtcctgcctcagcctcccgagcagctgggactacagatgcccgccaccacgcccggctaattttttgtattttttagtagagacagggtttcaccgtgttagccaggatggtctcgatctcctgacctcgtgatccacccaaccttggcctcccaaagtgctgggattacaggtgtgagccacggcacccagccatttctaacagtatattatttcaattcttatttcattgatcctttcctgtttatgaataaatcacaaagcttctctatgcctttgcttcctaataagcaaattaaatataacagggttgctatgaaaaaaggaatgaattattcttaagcagctttatcacttagatagtgctttggatttgaaaacagaagccagttattaatgcactaaatctaagctcttagtttaaaggcctgtaagtgctataaagctcaagcattccaggaccatctttacaaataaggagtttgtgctgcagaatgatcactgactgcctagaaagtgcaaatttcaagcttttgtttgggctttccctcccaatttaattcagctccatccaattaatgcttcctgagcgctcactgtgtacagacatcatcctagtgattacaagaataaaaactaagcaaagatggtccttgttattaatagatctacaatccactaagataaaattttgttattatttttatgagactataaagtagattttggtaataacataagcaatacagagtgtttcgggtaatttaaaagtggaagagattatagtggggttaggaccagtataggttgcaaggaggacgggcttaggataagaagctaactgcactcaatgcatttttttacatcagttaaatgaataaataacaaacattcttcgaacatctatgtcatgcattacaaaaggcagccaaataacacataactccctgcccccaagaatcttacagtctatttaagaaaaagaagaaaggatggcaagaggaaagagaaatagcatttggacaaaagaggagtaatataagggaaatttcagtcacaagaaacaatattaacaacaaaagatcaacaaccaataatgaagcaggctggggcccagggcaggcactagatagtgggagataaagctgaagtattaagatgatgtcatactggaagatcttgaatgctagactgaggattatgaattcaaaagatgatgagaaatgatgaaagatttttaagcaaagtcctatggtacataagctattgcttagactgatgtagtagtgtttcataatatctatattcactaacataaaagtaatgtgtaggttatatttcacaagaatgaactgcagaaatatatgtgtaatgtgatcaatttatgtaaaattatatgcatagacaatgactctcggtatttgctctgaggaggaaaactcaagagttggaggagggggaaaaggaactgtttaattttcacttcacccatctgtaagattttatttttgtaagcaaaaacaatgtaaaaagaggcttggctgtgaaaggaagatggcaaactatgtatagtgatgcagggctgcaccactgtggaatttaatgcacacatatatacctctctcatcttttcaccaaacgctcaaaagagtagactatatccacttatttttaatgtcctctttctgtcccataagcacaggctttacagtcaaacagagctgggtcaaaccacaattctaccacttacaagcacatactaattaccactaacctggagctgaccaagtataccaagtataacatcaaattgtttatagatagatagatagatagatagatagatagatagatagatagatagatatagatatagacatagagatatagatatacagatatatatagatatatatcagacaagctaaaagaaaaaaattacttgttatccacaaataacgactggtaaattgtttatgtatccaggctgacttattcttctattgctctctcttcccacttttgagatagaagtcagtatacaaattgctttgtaatctctttttaacacataataatctacagtgaatactttcccaagatataatgtttagtcaacccacagtattctctattctacagatgttctacagtttattttccatcaatttgattttgatgaccatttagactgccgccagtatttactgttatatacaatactgtaatcgggatcttcatatagatatttgtccccatatttctgattaattccattggataaattcctacagggaaaatcagcaaagtctaagaaatacaaaataaaactctgggagtaaaaggcgaatatgctctctagaaagcttatattaatttatacttttaccagcaatgaccttctcatgtctcttatcaaacatctacctagttttcttctacttttaaaattagccttccttgtaacagatgaattactgaatagatttaagctccctaacataagagccattgtacccatttttgtttcccttacggtatctgatacaatgcctggtactttgtagatactaaattatttatttttggatatttatcttttgtctaactacttattagcacttttactgatctcttatcaatgttaaagcttttacaagtatttttagtagaatgctatttatttgcaaataatgaccattggtcttctaaaaaaattttcccacacaacacctatgtactttttaaaattgtctctgtagctggggtattagccaaaactgtcagaacaatgtgtttaatattaatgataaatgtaggcaaccctgttttctgattgtaatgggaataaacctggtatattactgttcaatatgattgttgatttaaaatagacatattagacagtatctatttttattttttgaaagtttcttgaaaaaatattaaattttatcaaaagtctttcagccatgcacttagctattattttttaatttgacccatttagtaggatattattagatttttctgttcctaattcatctttgcattcctgagattaaccagtttagtcatgagagttcacattcatcttattcttaccctctactttcagaaaattgccaaatccagcagatttcacttttttttttttttttggtgagactgagtcttcctctgttgcccaggtttgagtgcagtggcgtgatctcagctcactgcaacctccacctcccaggctcagacaatcctcctgccacagcctctggaggagctgggattacaggcatgtgccaccatgcccggctaatttttgtatttttcgtagagacggggtttcaccatgttggccaggctggtcttgaactcctgacctctggtgatctgcccgcctcagcctcccaaagtgctgggattacaggtgtgaggcactgcacccggccagatttcactattcttgcatccacgtgattctcattgctactgctctagttcaggccttctttgcttctcagctggactagagtaatgacttttaaatacctccccctcctgttcctgatacttcgtttccattacacatgtagtatataattgcatacaattcatatagtctctcaatttatttataatttcctgcaaaaaggtattaaatgggccaggcatggtgacttacgcctgtaattccagcactttgggagggctgaggtgggtggatcacgagtcaggagatctagaccatcctggctaacatggtgaaaccccatctctactaaaaatacgaaaaattagccggacatggtagtgggcgcctgtagtcccagctactcgtgaggacaaggcagaagaatggcgtgaacccaggcagtggagcttgcagtgagcagagatggtgccactgcactcgagcctgggtgacagagcgagactccgtctcaggaaaaaaaaaaaaaaaaaaaggtattaaatgtgttattaaatgtgttttgtcatagttattcctaatttccttataatttttgttgctactataaatgtgttttattttaaatgatactgctttctgtttgctgctggtatacagaaaaccaaaggattttattatactgattttacagtcaatcaccttactaaactccctttttgttgttgttgttgttgttaagagacagggtctctctgttgctcagactggcctcaaacccctgggctcaagcaaccctccagtctcagcctctcaagtagctgggattacagatgcataccaccacgcctcaaactcccttattatttcctaataatttggtaactgtaggtaaccttgttttatctctggtcagaaagtataatatgcaagataccaactcattaaaatgtactaagccttactttatgatctagtatgtaatcattttttttctactgttccatgtgcctgaaaagaatatgaattctctaattactgggcatataattccagagatgagtattagataaaacttgctcatggttaaaatattctgtatctttactgactttatatctgcttgatctaccaataattaagaaataggttgcaatctcctcctatgatgaagggtttctcagtttttccctaataaaaaattaactatacaaatttcacttaatctactttgaggctgttctattaggctcatacaagttcagaactgttatatcttcctggtaaaatgaaccctttatcatatataatagccttctctattgctaataatgcattttttcttttctttctttcttttttttttaacagtctcactctgttgcccacacgtgatcttggctcactgcaacctccacctcctgggttcaagcaattatctgtctcagcctcccaagtagctgggattacagggacctgccaccacgcccagctaatttttgtatttttagtagagatggggtttcaccatcttggccaggctggtcttgaactcctgacctcatgatccacccgcctcggcctcccaaagcgctgggattacaggcgtgagccaccacagctggctgcattttttctttaagtttatcatgtctgatattaattcagttacgccaactttcttttggtgtttgcctcatatatctttttcctttgtactatttcaaccttatgtagacatgtcacttattaaaagcatataacttaattttggctatatctaatcctatattttcttaactggtgagtttattccattaacatatattgtaattattatatgtctggatttcttcccaccaccttacttcttaatttctgctcattccactttttcccatgcttcttgtcccttcttggattgaatttgtgtttgtccccttttttctgtctctacttgtttggaatttacactatttttagacttatttttaaatttttactatgtacatttagcttttcaaagtctaaagttaattaatatcttaatatcctgcctctcccttgaaattaaaaaaaacactctagaatacttcaattctagaattccccttagtcctgatttacctgctgttagttgatattttagttctatcatttttaaacgcccccttaaatataaaatcattattttatacagactattttatttacccacgattgctttctgcatctcatactagcctccttatatctcagactttctggattcattttccttttccgaaatataccctttagaagttcctttactgtggttatctcacagtggtaaattctctccgtttttgttcatctctgaaagtttttatttcatacctttgttgtttaaatattttgttttttcctgagtacacaattccaggttgccagttgttttaacattcagaaaatatcattctgctgtctttggcttctgttattgttattgagaagtctgctgtcgtcataattgtcaatcctccataggtggcttcttttaagatcttctctttgtctttaatgatctgtagttccattatgatctatcttgatgtggatttctttttatgtattgtttgcatttaatctttttcctcttatctactgcttctaccttaatccaagcacccctctaatttcttcaggtctccatctgtatcactctcctactcctcatgccccatctatatctggagtttgccaggctttttcttgccatggggcttttgctctgctcttctgtttgcctaaaagctggaaagaaccttcccaccactcttagcctgcaaactccaactcttttagatctcagtttaacatcaattccttagacaggcttttaacatcaattccttagagaagctttccttgaggctttttcttttaagtttcatttaatcttgataaagcagtgaaaatggtaagtgttattaaatctcttccctaaattgccataatagtttccctctgttagagagcatcgtttttcccttgctcagtctttatcccactttgcaattacattaatatattcatgtggtatttgttaatgtctgttttccccacttgtctgtaaactacactggagcaatggctgtgtctggctttattcactactctatactcagactataacacagtacctgggatacagtaggctttcaataaagttttgttgaataaacaaatgaccaaatggaaaaaaacttcctttaagtggcatataacagcacttctagatctaaaccctgcctgttctgcagcctcatctcccaccttaccccattcccatctcacacattctattggaaaataatgctctttcgtgcctctgtgactttgcatttgctatttattcccatttcctaaaaaggtactcctttagcctgcaaactctttattcagcaaagaaacctcctccatgaagccttcctttaggagatttgcccatccgtgggcagaggtgtcctgcccttcccgacagccctggcatctcaatcacagcctcaccctagtggatcttaatggctgccatctgcctcttgtggatgacagaagcgctatggtctactgccctgcatatcctaggcattcaaagaatgcctggggaaaggggactagaaaggccatgcagagcagaataaccgagggtgtcaggtctttgaggagataagaagaaatggggtcacgagaataagtaaaaggattagtctcatcagagtgaacgttttcagaaaaacaaggaaattgagttgagtgcaggagatgaaaataggtgaactgtgataggaaaaggaggaagttgaggcagtggcttcatgttctcagcaaaataggagaaaccattcttttgagagggacaagggacaaaggtggagggtttagagagtaacagacaaaacagaatagccacagtgttcagtgtataagtcctaacagctgactcctagctaatgtaaaagcttccttaaacaaatttcttaccagtcacactttaccaaaccaaaccgaggatgcattagtaagtgtaactctactgtcccagctctctgtttccagagaacaaatctgatctaagtggttacgtccttttaaaggtcaggcatttcacattcaatcatttaagggaatctttgatttaaaatactacatatgaaagcataccaaaaaaagttaagtgcttgtatcttcattacatgtattttactacacacagttcttgtattgagctgtcttttcacataaagaaaaagattgaatggtccttaaaaacagggccatgtgttactagcttctgtatcaatttgcactgtcttgcaaaatatcttgcacaaaggaggcattcagatagttttttaatgaaattaaataagtgaataagtcccttaggcatcctagattttggaaggggaatttacaaatctttttgaaataatacaaaagtggctattgtcaggaagaggaatagacaatagaaaagaaaaactagagcagtacaagaggtgagaattatccaaaaatgttcttggttgattgcactagtggattcagtggatatttcacaacaccttttattttttttgtgatggagtttcgttctgttacccaggctagagtgctgtgtcacgatcttggctcactgcaacctctgcctccagggttcaagtgattctcctgcctcagcctcccgagcagctgcgttacaggcatgagccaccacacccagctaatttttatatttttagtagagacaaggtttcgccatgttggccaggctgatctcgaactcctgacctcagatgatccacccactttggcatcccaaagtgctgggattacaggcatgagccactgtggctggcctaaaataataaattttaagttaaattttccactctaagaattggaacatagtctatcctactcaacttagcatatacacactgaaaaccttcttagttcagggcacagctttgctatctatatgttccttacccaaatcacttaggctctctgaacttccctgatctataaaatgggcataaaaacagtatttatcttacacagatgttacgaagactaaatggaaataatacaatctaagcaccgtgccaggcaagagtaagtgctaaccaaagttagttataattccctggaaactataatctaaaatgttagagataaaatattacttagaccagtggttcttacgtggtctgtgggtctctggaggtctctgaaactcttttagggagtccataggtcaaaactatttttataatatttatgacattatctatctttttaacggggatgacatttgcactaatggtgcaaaagcaatagtaggtaaagctgctggcaccctagcatgaattacagtaacggcatcaaactgtgctagtagcagtatattcttcactatatatttacaggttttttttaagtttcatttaatcttgataaagcagtaaaaatgattttattaaatctcagcccttgagtgcacatcttttaatatcctgtgtgatgaaactggcagtatgtataaaacaccagttcaagctgtgttccttttggaaaaagaaatacaaaaagtaaaagaaaatttaaaaaaataaatgaataaagtactgggtccatatacctaagtagatggctgtctggaaaaacgcacttgtgagctgtctgaattgtgagctgaactagtcttgatccatagaacaccatctttacttaaaagaaccacagacaaattatagttattcaggcctagctgtttggcagacattttctcaaaagagaaaatcaaggaaaataactatcagtatttggtgccaatattaaaattcgagctttcaagtaaaaattagaattttggaaaatgtgtatctgccaccatcagtttgacagcttcccaatgcttaaaaattttgatgaaattggtagtgatattaacatattttaaatactgcaaaataaaatgtgtcaacatttgagaaatctgcataactcagtgaaccagtattttctaaataactgatgttagaaaaccatgcatgggttaaagatccagtcaaaatgtgtaacagaccaatggattttaatgtaagagagtatgaatgttcactaatacaggttcagattccacattgcaactaatctttaaaaaaaaaactatgacttgtcaaatttagagtagtatgagatatccacaattatctgaaaagatcattaatgtactccccatttttctaactacatatctgtatctgtgaggctggattttctcatatacttcaatcaaaacaacatatcacaatagactgaatgcagaagcaggtatgagaaaccatttgtcttctattaaagagattcaaaaatatgtaaaaccatgcctatcttctcactaaatttgggggttggaaaatagtgttacttttcagttaaaaaaaaaaaagtgttgtggccgggcacggtggctcatgcctgtaatcccagcactttgggaggccaaggtggacagagcacaaggtcaggagatcaagaccatcctggctgacacggtgaaaccctgtctctactaaaaatacaaaaaattagccaggcgtggtggcgggtgcctgtagtctcagctactcaggaggctgaggcaggagaatggcgtgaacccgggaggcggagcttgcagtaagcctagatcacgccactgcactcccgcctgggcgacagagcgagactccgtcacaaaaaaaaaaaaaaaaaaaaaaaaaaagtgttgttgtgttattttttaatgaataaacaagtaaatttctcagttttaatttctactcaggtaaatactgacagatacaactcatgtaaaacaaaaactctttgaggttctcaataatttttaagaattatgagactgtgagaccaaaaagtttcagaactgccatcttagatgattcattgtttctgttcacaaagttgaaaaataatctaccctatacatagtacattgtagttctagaatactgtgaaggcatttggatacttagaacacaaagtaaatgatccagatatcaaatttcaacctggcggaaatgttttgggatatcctagtatgtgatctcctataaagtaacaatgtgctcctggtttttaaggtaggtcattagtatgctgtttaggcacacaccagatattgaggaaaagaaaaatctggcagccaggcacggtggcttacacctgtaatcccagcactttgggaggccgaggcaggtggatcacgtgaggtcaggggttcgagaccagcctgaccaatatggtgaaacccgtctctactaaaaatacaaaaattagccaggcatggtggtgggcatctgtagtctcagctactcgagaggctgagacaggagaattgcttgaacctgggaagcagatgttgcagtgagctgagatcacaccactgcactccagcccaggcaacaaaagcaaaactctgtctcaaaaaaaaaaaagaaaaatctggcacagaacacacaccaaaatagctcctatgccattctataccatttttcctcccttctccccaaaacttgcttccaaatgaaatgagataagacaccattgagattatcaattcaaattaagataacagaaaccttataagaaatcctgcaggaaagcaaataaatgtgggagcctgcctagagaatcagattttctctagaaggtttctggctcagtgtgaaccttcttctaccctgccctaaataaaaagaccacacaaaaacaaatttccagtgcatgtggggctctctgttcaccaaaagctttgattcaactaataaatgatgttaacattggaaatggctctgaatgccaaggccagccttagaaatcgcctcaactgcagactgagaatcgctgggagggatgtaggtgtagtaagaacaaaaaattaaaaagagtaaacatctgcaacctacagaatgggagaaaatttttgcagtctacccatctgacaaagggctaatatccagaatctacaaagaacttaaacaaatttacaagaaaatatcaaacaacctcatcaaaaagtgggcaaaggatatgaacacttttcaaaagaagacatttatgcagccaacagacacatgaaaaaatgctcatcatcactggtcatcagagaaatgcaaatcaaaaccacaatgagataccatctcacaccagttagaatggtgatcattaaaaagtcaggaaacaacaggtgctggagaggatgtggagaaataggaacgcttttacactgttggtgggaatgtaaactagttcaaccactgtggaagacagtgtggtgattcctcaaggatctagaactagaaataccatttgacccagcaatcccattactgggtatacacccaaaggattataaatcatgctactataaagacatatgcacacgtatgtttattgtggcactattcacaatagcaaagacttggaaccaacccgaatgtccatcaatgatagactggattaagaaaatgtggcacatatacaccatggaatactatgcagccataaaaaaggatgagttcacgtcctttgtggacatggatgaagctggaaaccatcattctgagcaaactatatgcaaggacagaaaaccaaacaccgcatgttctcactcataggtgggaattgaacaatgagaacacttggacacagggcagggaacatcacacacctggacctgttgtggtgtggggggccgggggagggatagcattaagagaaatacctaatgtaaatgacgagttaatgggtgcagcaaaccaacacagcacatgtatacatatgtaacaaacctgaacattgtgcacatgtaccctagaacttaaagtataataaaaaaaagagtaaacattttttgatgtttcgataatgtaagtctgtgccaagcactattttaagcattttaaataatttaagtaatttaatctttttaaatttttttttttttagacggagtctcgctctgtcaccaggctggagtgcagtggcaccatctcggctcactgcaacctccgcttccccggttcaagtgattctcctgcctcagcctcccgagtagctgggactacaggagcatgccaccacaccggctaattttttgtatttttttagtagagatggggtttcaccgtgttagccagggtggattcgatctcctgacctcgtgatccgcccacctcagtctcccaaggcactgggattacaggcgtgagccaccgcaaccggccaatatttttttttttttttttgagacagggtctcgctctgtcacccaggctggagtgcagtggtgtgatcacggctcactgcagccttgacctccttaggctcaggtgatcctcccacctcagcctcctgagcagctgaaactacaggcgcacaccatcatgcctggctaattttgtttttgggtttttttttttttgttttttgtgttttttttttgtatagagagagtttctttcactctgttgcccaggccagtcttgaactcctgggcttaaagcagtccacccacctcagcctcccaaactgctaggattacgggcgtgagccaccatgcccagccaaaattaagattaataaccctatgaagttggtaaagttttcatccccattttgtcctggtatccactacaactgcattacatcacgtttgaaactcatactctaaaatgccatccttcctgcctcttatcctggaaaacacaaaggaaccactgagttcacaaagactagattgttactatcaatacccgttatccaagtaactcagtagctaccacattagcctggtgcagggtgcgcgcctatagtcccagctacttgagaggctgaagcagaaggatccctggagcccaggacgctgagatcagcctgggcatagtaagacccccatcctaaaagtcagacttaaaatctgatactttttcctacaacaaattcctctttcaagagattaacttactattaaaaaaaaagagagagaaataattaacatgttctttacaataagaactcaaagaaaaggaatcaaaatgaatcaaacttttgaggatgcttttaggtacctcttgattgaaacaaagaagcattccagaaatatacctgttggagccatctttcatatggactttggcgtaaagaacatccaccatgccaggatcatcattcatgtattctatccctgccatctccacttctaggggtttacccccagaaatatcactgcaaaggaaaaagcattaagatatctataactgtttaagctaagagggctattttattttgaaacatggttaatacacatagtcaaatatgtatgttacttacatgtgtacaaaaacatggtagttgtgttttttcctaacattatctaattgcccttctaatttcaaaattaataaattttcaatgcacacaaattggaaaacaccggaaagtatttccaatgtcaaactacatttatcccaataccagtttattagcactgtctcatgaagaaagtcaagtgatgacagttctgatccataaagacatttactatgttggctcatctctcaggcgcccatctctactatttctacaagttacaaacagcatttcactcatataacaaaggtggaggtataaactgatatcacatctttatttacttttttgtttgtttgttttgttttgttttgagacggagttttgctgttgcccaggctggagtacagtggcgtgatctcggctcactgcaacctccacctcccgggttcacaccattctcctgcctcagcctaccgagtagctgggactacaggcgcccgccaccacgcccgcctaatttttttgcatttttagtagagatggggtttcaccatgttagccaggatggcctcgatctcctgacctcgtgatctgcccgcctcagcctcccaaagtgctgggattacaggtgtgagccaccacgcctggccttttttattttattttttttgagacagttttgctagtcgcccaggctggagtgcaatggcacgatctcggattgcaacctccacctcctagattcaagtgattctcctgtctcagcctcctgagtagctgggactacaggcacctgccaccacgccaagctaatttttgtatttttagtagagatggggtttagctatattggccagggtggtcttaactccagacctcaggtgatcctcccgccttggcctcccaaagtgctgtgattacaggcatgagccactgcgctcagcctgatatcacatctttacaagcaatctgtcaatatttatgagaagccttcatcaataaaaaccctttccccaagcaattccatttccaggagcccaagctaaggaaacaattttgaattcagttacacatcaacttgtgtaactgttgataaagcaaagttctcctttacagaagaactccaaaactaataaatgcagaaggaacaacaaaattagaatcttgcaactcctgataaaataatagatcttgacaatgatcaccaatggctgctaaaacttgggcaaaaggctgggggaaatataaagtgacctctctaaagaggagctctataaataatggtcatgatgaccacacctgaacccactgaccaagctgaatattaacagtaaaagaaacaaccagacaatatgtgcctcttagcatgatgcaataagaatatactcatatttatgagaaataatttatgcatagggttttttttttttttttgagacagggccacactctgtcacccaggctagagtgcagtggcgtgatcttggctcattgcaacctccacctcccaggttcaagcaattcttgtgcctcagcctcccaagtagctggaattataaacatgtgccaccatgtctggctaatttttatacttttagtagagactaggttttgccatgttgcccaggctggtcttgaactcctgggctgaagacatctgcctgccttggcctcccaaagtgctgggattacaggcgtgagccactgcacttggcctatgcatagggttttaaatgaggcataaagttttgttttgagtaccaaaagattggcaacagactaaaagtcaaataacatggtactgattagataaattataatactaagagcaataaataaactatacatgtgactaaggaagcttttaggtactgatataaaacaatataaaaaacattaaaaactgatataaaatgatatataaaactgatataataagttatatttctaagttttaaaaaaggtttacaacaatgtgcatgctatgctacttgtacaaaagatggaggtataaaaaatatgttatatatatttgttcatacatctataaaatccctggaaggatacagagaaagtggtacactggttgcctctagagaggaaagcaggtggctgatgaatttcagtggtagagaaactgcactgcgtatcctttgcaactttttgaactatgtaaatgtattatccattaacaagttaaaattttaaaaaatatccaaaataaaccaaacacaaaagtgtatatactaaataattctatttatgggacatttaaaaacaaaccaccaaatctatgtaatagaaatcagaacagaggttgcttctgggagaagtgaattcactggaaaaaggcatgagggaccctcatggggtgatggcaatgttccacgtcttgatttgggtgaggttgcacaggtatagacattggtcaaagctcatcaactacacctaagatctgtgcatttttagtgtaagtaaattacacctcaaaggaaaaacatacatatacatatccaaagtgctaatggtaattattttttagtggtaagattacaaaatgatattttatttttgtgtatctgtaattactggttttcctaaaattaacacgtattacctttgtgttaagtaaaaccccaccatcctgttttcttcctggaccccttaataaagaaacttgtactgcaaccagaaaaggccttgttgtgccatgctgaaacccaattaaaaatcagctcactgcgcagccttctccaaaccccaaggggataggcactttctccatcttatccacatctatatcctcaaaatctcacaccatgacttatacaaaatgggtgttcaataaatctctggcaaacattaaatggatgttttaagggggaagctgttctggacaattttgagaagaatatggtcacaggctgatatattaaatagtttggatatttgtccctgcccaagtctcctgttgaattgtaatccctaatgttggaggtggggcctagtgggaggtgttgggatcatggggacagatctcttgtcaatggcttgggccatccccttggtgataaatgagctctcactctgagttcacacaaaatctacttgtttcaaagtgtgtggcacctcccctgccactctctgttgcttgttcctgcttctgctatgtgatgtgcttgatccccttcaccttctgccataattgaagctttctgaggcctcccgagaagccgagcatgcttcttgcaatcctgcagaactgtgagccgattaaacctcttttctttataagttacccagtctctggtatttctttatagcaataatgcaagaacagcataatacacatgctatattgtcattaagtaaaaatgtggtactgccttaaaaacaaaaggatttggccgggtgcggtggctcacgcctgtaatcccagaacttcgggaggctaaggcgggtggatcatgaggtcaggagatcgagaccatcctggctaacatgctgaaagacggtgaaaccccatctctactaaatatacaaaaaactagccgggcgtggtggcgggcgcctgtagtcccggctactcaggaggctgaggcaggagaatggcgcgaacccagggggcggagcttgcagtgagcagagatctcgccactgcactccagcctgggcgacagaataagactccatctcaaaaaaaaaaaaaagaaaaaaaaaaggattttaggatcaatcaaaagacagctggaaaaaaaggaaaaagttgtcttgacattgaacccaggtcatggggatgctctttgtagcctaggaatcctagtagtaaagattcccttaacacttcaaggccttattattgcataagaccaaaacttctctcagtgtgaaactagtaactcaactattttaggcggacacttttctttccatgttgcccagggtggtctcaaactcctgggctcaagcaatccttccagcttggcctcccaaagtgcttgggttacaggcatgagccactgcgcccggcccagatactttttctaattaagaaaaattacagccttgatcataataagtcttcctatagccacctctaataagaagtgaaatgtttcaaaacacaagccaagctctgaactgtcatctgaggtatgtagcttccatcaatacacaatgtatcttcattccaagtactagccaaagaattcgatttgaaagattgccactgaatcctatcaaaatgaagtcaaaaaagtttgtttgaaaaaaagtttcacactaaatacacatcctccgacatttttaaagctctcaccctgcatagttatatcaccagaaagcatcaccacaccattggcttagattcccactaaaatgtttttaatgggttatatttaatgttatatctgcaatttctaaggtcaacagaagaaagacccatatgaacaatgtttttatcttctgcaaaattcctgttaaagacactgtcaatcatcattcagcattctttattaagatttacatgacaaacttttgatggatcgagaaccagaaaaggttactctcctgaaaaaactgttatactggggttggcttcacaacaacctgagtgtacttaacactactgaactatgcacttaaaatggttatgatggcaaattttatgttgtattttaccacaactgaaaatttttttaaactataaaaaaaattgtcatactgctttttatcagacaagaactatactaagtggtgtatttctttttgtaatttagttcaagtacactggtgtcagaaaatagtaccaaactttaatgctcaagtacaattattaccttaccttgactttcagatagaattttctccctataccatccttatggtttctaaatctctgactgtaacatttcttttgtatacatgtcctcactcttaactacctcaaatacttggaattagatggggtactaagaagaaaaaaaattagaaacaatgaaacaggatccaaagcctgctttatgagcagaaacacaaactgtttcaacccacccctgagatttatcaagagggagatgaaagagcaggatagaaatccgatggtttgcccgataaacactctttgtcttagtggccaaacaattacatctgggacaccagtaagcaaattactttccaactgatgacacgtgaggcaataatcaggcattaatgtttgttcacgcgtattttctctcctctttctagtccctttaaacttctttggtttgacgtcaggcctgctggaaacactgaggcacaggagggtgctgctgtgactgaagaagagctgcacatttgtcagactccgtactcagagccagtgcacggtctgtgtcctacatctcacaaaggaaagtcaccagggacacagccggagcttccgaatttactaaacactgaataattcattcaaaatctatagagctacaagagcctttcactgaaaaattgaaacaaaactcctgtttttggtctcatagcatccttcaaattaaaaaactacccccaaatttaaaatgaatactcaactactcatttcttcaatatagccatacagctccacagtttaaatcaaattccaacatagccacatttatttcaatactcccattttaaaaaccatcaaattaaactacagcacactatgtacaggtctgttcatttttcagtgttttcctttcatattttaatttgggaccactacaccataaaaggttcaggttagaaatgccattatttatggacattttttctaagtacaccaagcacaaagactaaggtcaaagagcaagaaaaaattcgatgatccaatttactgatttacttaccagagatttaacagaagtaccctttttgtttttttaagaagtagtctcttctcagaagtaaatcagttttgcactttttaaacaaatgcatgtgatgggagaaatcaggagaagaaggttggggaggcttgctttattttactcgctggttccacatctttccagctttttaaaaagagcatctttaaacaaatttttgcatgcactgcagatttttggcagggtaactttgtcctatttcaaaagctttgctgaatttgaaaaactacaattactgttttcatactgtcatgtcaaaaattctgaggaactattaaaactgctctttattccccaggcacactaactctgacatgcttaaagggctgagatttggcatttagtcacaaaaggcaccaagaaacataaaagggaggaactcagctaaatctttgcatagcttaggataaaccttcagtgattaaaaacctgtgacctgattttcataaggtaaaaagaacaagtacttctctaaacaaaatattttatctacctttaaattttttcttagcaggattatcccaatggcagccaaggaaatgtagtagctttcagtttagtttagcaaaaagtaaactgggaatacattaaagtatcagaactgatccttaaaccaggtaaaactgccctgctttgtaaaataaagcataatgctttgctttatataagggaaatggaaagtatctaatgacaaacaccaaattattttgaatttcaggtaagatctagagaaaacagatatgtccgttactgagcaaagaacatgacaagaagtgttctttgctctctgagattcagaaaggatagaagactgcaaaccctatcagcttatgatcttgctcaagaaaaatagtttgtctttgaaaaaattagttgaaaaagataactggcccataaagtgtttgtattacacagtttctttttttttttttttttttgagatggagtctcactctgtcgcccaggctggagtgcagtggcgcaatctcggctcactgcaagctccgcctcccgggttcacgccattctcctgcctcagcctcctgagtagctgggactacaggtgcctgccaccatgcccagctaattttttgcatttttagtagagacaaggtttcaccgtgttagccaggatgatctcgatctcctgacctcgtcatctgcccgcctcggcctcccaaagtgctgggattacaggtgtgagccactgttcttggctaaacagtttcatatacaacataactagagaaaaattttagatccttttaccttgttctatccaatgaaccaggtaaaccatttctataaggccatgttagaatagcatggggcctgcctacaagaatggagtaaaaaaactatttgagtgaattggctttcacatttctctcttttgtcaatcttaagtaaaaggaagaaagtaaagggaaataggggaagatacggttctttgaaataaagctgttatgccagatgtatgtgtaaattaaaattttacagtaaaaaaagaataacaactctgccctcagaacagtaatgctttccctgagtcaaaacagattgcttagactgtttctggtatcctttctgaactggctggagatggcagctcacgcctgtaatcccagcacttttggaggccgaagcaggagagttgcttgagaccaggagtttgagactagctagcctgggtaacagagaaagaccccgtccctaaaaaaaataaaaataaaaataataataaaaaaagttttattttttaaaattcttgctgaatcaaataaaattatttgtattaaaaaaaaaaaaaaaaaagaggccgggcttggttgctcacgcctgtaatcccagcactttgggaggccaaggcgggcggatcacaaggtcaagagatcaagaccatcctggctaaaatggtgaaaccccgtctctactaaaaatacaaaaaattagccggacgcggtggcgggcgcctgtagtcccagctactcaggaggctgaggcaggagaatggcgagaacccagcaggcagagcttgcagtgagccgagattgcgccactgcactccagcctgggcgacagagcaagattccatctcaaaaaacaaaaaaaaagaaagtaagtcagtatttctaaaatataatgaagacttccctagagaatcgtgttataatgtttgcactccagcctgggcgacaggaaaaaaaaaaaaaaagaaacacagtgtttctaaaatataatgaagactctcctagagaatcgtgttataatgtttgagttactgtaatagacagaataatgacccccaaagatgttaatgtcccactctctagaatttatattctatcttacatggcaaagagatttttgtagatgtgattaaggttatggaatctggtatgagaggttagcctgtattgcctgagtgggctccatcaaatcacatgagtccttcccatgttatacaccctctggttcaaaaacaagtctgtaataccaaaaagaagccagcccaggtagaccacccaacccccatccctgagaattactcacttaatgaattcctctttacactgctgtagcatctcacatgtctgctggatctcttcctcactcaaaagcaccaacatcccaatagttagatgaagctttttaggattctggaaaatgctgctgtcaaccccatgatcctgttatcaaagagagaaaaacaagaaactcagcccatacaaaggcaaatggcaagaataaaattgagtccccaaaaataaacccacacacctacagccaagtgattttccacaaggtgccaagaccattcaatagagaaagtctcctcaataaatgatgctagaacaatagaatacccacatgcaaaagaataaagatagactactacctcctaccatataaaaaaattaacaaaatagatcatgacctggaattcagcaatggattctcagatatgacaccaaaaacatggacgacaaaagaaaaaaataaactggatttcaccaaattaaaaaacttttgtgcatcaaagaacactatcaggaaagtgaaaagaagcctacagaatggcagaaatatttgcaagtaatttacctgataagggtctagtatccggaatatataaagaactcttccaattcaacaacgaaaagaaatctaatatttttattttttaattatttatttatttttgagacagaatctcgctctgttgcccaggctggagggcaatggcgtgatcttggctcactgcaagctctgcctcctgagttcatgccattctcctgcctccgcctcccaagtagctgggactacaggcgcccgccaccacgcccggctaatttttttgtatttttagtagagaacagggttcaccattttagccaggatggtctcaatctcctgacctcatgatccgcccgcctcagcctcccaaagtgttgggattacaagagtgagccaccgcgcctggcccaatttttttattttttaagagactgggtcttgctgtcacccaggctggactgcagtggtgcagtcacagctcactgtaacctcaaactcctgggctcaagcgatcctcctgcctcagcctcctgcatagctgggattatgggtgtgagccacagaacccagtagaacccaattttaaaatgggaaaagggaccaggcacagtggctcacgcctgtaatcccaacattttgggaggctgaggcgggtggatcacttgagatcaggagttcaagaccagcctgaccaacatggtgaaaccccatctctaccaaaaatacaaaaattagctgggtgtggtggcaggcgcctgtaatcccacatactcgggaggctgacacaggagaatcgcttaaacctgggaggcagaggttgcagtgagccaagatcacgccattgcactccagcctgggtgacaaagtgagactctgtctcaaaaaaaaaggaaaaggactggaatagacttttctccaaggcagaaatacaaatggctaacaagcagaactggctaacaagcacatgaacatcattagtcacttagggaaatgcaaatcaaaaccactatgaggtaccatttcacacccactaaaaatcaaaataatggaaaatgacaagtgctggcgaggatgtgtagaaattggaaccctcatacattgttgctaggaaggtaaaatgactcagcctctgtgaaaaagagtttggcagttcctcaaaaagttaaacatagaattaccacatgacccagcaattctactcctaggtatatgcccaagagaactgaaaaagggactcaaatacatgtacatgcatgtttccagaagcactactcacaacagccaaaagatggaaataacccaaatgtatatcaacagatgaatggataaacaaaccgtagtatatacacacagtggaatattattcagcctcaaaaaggaatgaaattctggctggccgcggtggctcatgcctgtaatcccagcactttgggaggccgaggcaggcagatcacctgaggtcaggagttcgagaccagactgaccaacatggcaaaaccctgtctctactaaaaatacaaaaattagccgggtgtggtggtgtgtgcctgtaatcccagctactacggaggctgaggcaggagaattgcttgaacctgggaggaaaaggttgcagtgagccgagatcgcaccactgcactccagcctaggagacagagtgagactcactctgtctccaaaaaaaaattttggctctgggaagcacaaaaagtaaatatacctcatgaatccctaaaattgaggtgaaattcacataatataaaattaaccattttaaagtgtacaatacagcagtatttatatttagtgtattcaatgttgtgcaaccaccagcattctttagtagcaaaactttatcatctgataaaagcattccatatccatttatttatttactttatatttatttttattttttgtgatggagtcttgctctgtcatccaggctagagtgcaatgatgcgatcttggctcgctacaacttttgcctcccgggttcaagcaattctcctgcctcagcctcctgagtagctgggattacaggtgcctgccaccactcctggctaattttttgattttttgtagacagggtttttaccatgttggacaggctgatctccaattcctgacctcaggtgatccgcccatctcagcctcccaaagtgctgggattacatgcatgagccaccatgaccagccctcatacccatttaaataaataatcactcctctttctccatgccccatcccctagtgacctctagtttgctttttgtctctttggatttatctattctggatatattatatagaaaggatcatacaatataagacctctgtgaccagcttctttcatttaccatgatgttttcaaggttcatccaagctgtagcattatcactccttcactcctttttagagttaaataatattttagtgtatgtatgtatcaaaatgtgtttattaattcatctattgaagatttgggttttttgcacctttgctattaggaataatgctgctataaacatttgtgtacaaatttctgtgttaacatatgttttcagttatttagggtatatacccaggaggagaactgctgggtcacatggcaattctatgtttaacttttgagaaaccaccaaaccattctctacattggctgaactaacaaacattcccagcagcaatgtatgaaggctcctgtttccccacatcttcactgacacttgctttttaaaaaaatgatagcgatccttgtgggtataaagtggtattacattgtggttttgacttgcatttcactaacgatcaatgatgatgacatcttttcatgtgctttttggatatttgtacatcttctctggagaaatgtctactaaaatcttttgcccatttcaaaactgtcttttcattgttgagttttaagaattctttataaattattgatagtatacccatatcggtccatgggtcccttttaaaggaaggtaggtctcaaatttcattaatctcattctgcaaatgaaaacaagaaaaaaaaagttgaaactctttttctttttttttgagacggagtttcgctcttgttgcccaggctggagtacgatggtgcaatcttggctcactgcaacctccgcttcccaggttcaagtgatttgcctgcctcagccttcctgagtagctgggattgacaggcatgcgccaccatgcccgcctaattttatgtttttagtagagacggggtttctccatgttggtcaggctggtcccaaactcctgacctcaggtgatccacccgcctcagcctcccaaagtgctgggattacaggcatgagccaccgcgcccggccaagttgaagctcttctattccaacaggaatgaaacaggaatcctatcactgaactgcaagttcttattgtataatcaggtctctggcctgataaaatgctccaaaggcagagaaaggtattttatcaagtatgaatagcttacatcctgttcttggtttacctaaggcttactgcctaatatttgcctttgcaacagtagttagttgactcttcgttttctaagtgttaatggagcttgagctatttttacatctgatgaaaagttttgtgattccacacatcaacccaaattgcctaatttaatgaaagtgattgtaaggaacaatcagctttaaatgtgtcaaggaaggctaagtgcaaggcttatcaccccagcttctctaacccatggcctgccacattagaaaaggcatgcaaagcccctcaaattattttaatatgcacaactccatcccaaactacaattgagaactgctccccagcaataacggtaatatttgttgggcccttgctctgctccaaacgttttctatgcaatgtatagacaaatatcttatgacagaagcactattatcatccatactttacagatgaggaaactgaggcactgagaaattaagccactttcccaaggtaacactgctaggaagagatgaggtcaaaattcaaacccaggcagtcaagccctaaagtctatacttttgatcaatattatatacatagccttcctagtaatagttgcccaaagtgggctaggaccataggaccaccacccagaggcaagtccttatgcatttcaacacagctcactcaataaatggatctaatcactaaattaggcctgagaataaaaagaatctcataattctatcaaaggaaagtggttttaacatctgccttttctagccaggcacagtggctcatgcctgaaatctcagcactttgggaagccaaagcggaaggatcgcttgaggccaggagttcaagaccagcctgggcaacttagaccagttcaagaccagcctggcaaacatgtttctttttgtagagaaaaaaaccaacataattgagttttttttctctacaaaaaaaaaacaaaacccacaatatctgcctttttttagatatgacaccaaaagcataatccataaaagaaaaaaaaatggataaagtgaacttaatcaaaatttaaaacttgtgcttcaacagatatcatcaagaaaatgaaaagataagccacagagaaaaatatttgggagaaaaacatttgcaaatcctacatctgataaatataaacataaaaaattcttaaagttcaacaataaaaagatacataatccaattttaaaataagctaaagatttgaacagatattttcccaaagaggatatactaatggctaacaaacttatgaaaagaggctcaacatcattagtcattaaagaaacgcaaatcaaaaccaaaatgagatatcacctcacacccatcagaattattataatcaaaaagataaacaataacaagtgtagatgaggatatggaaaaaccgagcagccactttgtaaaatataaatttgtaaaacagcacggccactttggaaaacagtttggcagttactcaaaaaattaaacataaatttacaaaaattcatacaaaaaaaatacaatgcagccatttcactcctaggattctacccaacgaaatgaaaacaaagatccacctcaagatgtgtacatgaaatctcacagcagtattatttataatagccaaagagtaggaacaatccacaagtccaccaactggtgaatgaataaacaaaatgtaggctagccatatatgcaacactattcggaaatcaaaagtaatgaactactaacacatgcaaaaacatagataagcctcaaaatattatgctaaataaaagaagccagatgcaaaagactacgtattatatgattctatctacatgaaatgtccagaaaggacaaatctaaagagactgaaagcaggttaacagttgcctgtggtgaggagtggggcggcaaacaggcacaagggatctttttagggtgatggaaatgttctaaagctgaattgtggtaatgactgcacaactctgtaaatttatttaaaatcactaaattgtacacttaaaatgaattaattttatggtatgtaaattataccttaatgaagctgttaaataagttgtgtctatgtcttttttttttttttttttaagacaaggtctcctctgtcacccaagctggggtgcagtggcatgatcatgaatcctgcagcctcaaactcctggcctcaagcgatcctctctcctcagcctccctgtggctgggactacaagctcacatcaccacacctagctaattttttttaaatttttgtagaaatggggtctcattatgttgcccaggctggtttcaaactcctggccttaagcaggcctcccacctgaagctaccacacctggctagctcactggtggtggcttacccctgtaatcccagcactttgggaggccgaggcagggggatcacgaggtcaggagatcgggaccatcctggctaacacagtgaaaccccgtctctactaaaaatacaaaaaaactagccgggcgtggtggcacgcgcctgtagttccagctactcaggaggctgaggcagcagaattgcttgaacctgggaggtggaggttgcagtgagccgagatcgtgccattgcactccagtctgggtgacagagcgagactccatctcaaataaataaataaataaataaaataaaatacttttaaaaatcaaagaaaaaactcaaaatgctattgaacaataggcaaaagacagacacttcacatgaataaagatataaaaatgactcgaacatgtagaaagacatataattttgctcatttaaaaaatgcaaattaaaactacactgaatatcatttctcacccatcaaactgacaaaaaatcaaaagcttcacaatacactctgttggagaggctgtagggacacaggcactttcatacattgctagcagaaatgcaaaatggtacaatccctgtggagggaaatttggcaatatctaacaaaacaaaagacactataaataagtatttaccatctgacccaatgctctagactgaattgtgtgccccccaaattcatatgctgaagcccttccactcaatgtaaatgtatttggagacagggccttttggggataaagttaaacaaggccataagggtggggtcctaatccaacaggactggtgtctttattcagaagaagaaacaccatgagtgagaaagcacagagaaaaggccggcaaagagaaacagtcgcatgaggacacagcaagcaggtggccatctgcaagccaggaagaggctatagcagaaagcaaccctgccagcaccttgatcttagtcttccaagttctagagctaagagaaaacaaatttctattgtttaagccacccagtctgtggtattctatgacagcagcctgagcagattaatatacccaacaatcctacttctaggaatttatcctgaagatacatcaacaacgtaaaatatgtatgcatgaggttagacattacagcattactgcagaacacttaaatgctcaagtatagaatggttgcaaactatgtataaacacatgtatacaatgatctggagtgatatttcaggacctattattaaatgagaaatgcaaagtgcaggacagggcgggttgcctcacacctgcaatcccagcactttgggaggtcaaggtgggcagatcacttgagaccagcccgggtaacaaggtgaaaccccgtctacacaagaaatacaaaaattagccgggtgtggtggcacatgcatgccggtagttccagctactcaggaggctgaagtgggaggatcacttgagtcccagaggtcggggctacagtgagctgtgatagtgccactgcactccagcctgagtgacagagcaagatcctgtctcaaaaaaaaagacaagtgcagaagagcttctatacttgctaccatttaagaaagaagggaaaataagaaaacatacattaatatatatatgcttatttttacaaaaaaaacacaggacaaataaaccagaaaacaatgatattggtcacccacaagggatgaaggagaaaggggcagaaagaatacaagaatgtgtgacacttctgggtatgtatgcctcttacatagttttgacttttggaagcacgttaatggtctacatattcaaacataaaataaacaagtatggaaaagggaaagaaacctaatttgaaagtaaactaaaaataaacccaactgtattttaaatgaatatcaaatccacactagagggggttaagaaagaatcaacaaacacaaggccgggcgtggtggctcacgcctgtaatcccagcactttgggaggccaagatgggcggatcacctgagatcaggagttcgagaccagcctggccaacatggtgaaaccccgtctctactaaaaacacaaaaattagcagggcatggtatcacgtgcctgtaatcccagctactcaagaagctgaggcaggagaattgcttgaacccaggaggaagacgttgcagtgagacaagatcgtgccattgcactaaagcctgggcgacaagagtgaaactccgtctcaaagaaaaaaaaaaaaatcaggcaagaatcattaaaggatgttaaatctaaggagaaattttgttgaggagcagaatatttgcatagtcttaaaatgtcctcttctagactgcttatcggttgaaaggtaaaaatatagtaactataaagaaattaatcaacactgactggatggtgtcaaaattaacatcaccaatgagggacactgtatactctaagaaggacacattatcacctatgcaatgctccatccaggaatgcctaagtctactcatgaggaaatgccagacagatcaaaagtgagaagcattctatttaaaaagccaatgtcaagaaagacaaagagccggcgtggcaccgtgcctggaatcctggctactcaggaggatcacttgagcccaggagttcaaggtgcagtggtgctcacagcaccgcactacaccctgggtgacagcagagtgagactgtatctcaaaaaaaaaaaaaaaaaaaagaaagaaaggcagacaaagaaagcctgtggaaatgttccagattcaaggaggctagaaacatgacaattaaatacaacacctaatcctagactgaatcccaaactagagagggaaaaaatgctacaaaggatattactggattaagtgacaaaatttgaacgtggatggtaaattagataaaactatcaatgttaaacgtattgaggttgagaactataacattattatgcaaaaaaaaaattttgccagacacagtggtgcacgcctatagtctcagctgctcaggaggctgaggggatagcttgagaccaggaattcaaaactagcctggacaacatagcaagatcccaccccccccaatatttttaattaaaatattttgaaatatttagggttaaagggctatgacatgtgcaactcactctaaagcagttgagaaagataaaaatggaatacgaaaacaaatagtgaaatattaacaataggtgaatctgaataaaggatactattcttttcttcaacttttctgtgagtttaaaactacttcctgtataaattctctattggtgctataacaaattaccacagactttgtggcttacaacaatacgaacttatcctaccatcttctggaggtcagaagtctaacatgagtcagcagggctgcattccttgcggaggctccagggcaaatcacttccttgagctttctagcttctagaggctacctgaatgtcttggctcagagtcacatcacttcaatctccactttaatcgtcacctctccttctctgactctgaccttcctgatttcctctttttttttttctcagacggagtcttgctctgtcgcccaggctggagtacaatggcaagataccagctcactgcaacctccgcctcctggcttcaagcaattctcctacctcagcctcctgagtagctgggattacaggcacccgccaccatgtccagctaattttgtagacatggggtttcaccatgttggccaggctgatctcgaactcctgacctcaagtgatctgcccacctcggcctcccaaagtgctgggattacatgcgtgagccaccgcgcccagcccaactcccttataaagacccatctcaacatccttaactttatcacatctcaaagtctcttttgccataaaaggtaatagtcaccggttttgggattatgatgtgaatatctttggagggccattgttctgcctgtcacatgcccccttcccaaaatgttttttaaggcatctttggggaaatacacttgggtgataaaactaaagaaaactaaggatgtgattactgtaaaagttgggacagtggttacccttcaggggaagaagacaaaggcaagacaaggaagtctagggtgctgataagattgtatctccagcctacacggtggttataaaagcatccatttgttctgtatcgtcttctgatgtgtgttacatttaacaattttgaagtttttttagaaaaactctaagcacaaggctgggtgcagtggctcacgcctgtaatcccagcactttgggaggccgaggcgggcggatcacgaggtcaggagatcgagaccagcctgggcaacatggtgaaaccccgtctctactaaaaatacaaaaaattagccaggcctagtggtgcacaactgtaatcccagctacttcgagggctgaagcaggaaaatcgcttgaacccggaaggcagaggttgcagtgagccaagattgcaccactgcactgctgtctgggcaaaagagcaaaactcagtctcaaaaaaaaaaaaaaaaaaaaagaaaaactctaagcacaaataaaagaggaaacagtttgtttttaagcttttatagatgttgggcttttttttctttttttctttttcttttgtagaaatggggttgcgctatgttgacaaggctggtcttgaactcctggcctcaagtgatccgctggcctcagtctcccaaagcgctgggattacaggcatgagccactgcacccagcccaatgttgagatgttttaaaggtaaaattacactagttcctctaaaaatatataatatatatattatatataatatttttatattatatatattacatatattatatatttttatattatatattatattttttatattatatattatatattatatttttatattatatataatatatattttatatttttatattatatataatatttttatattatatatattatatattatatttttatattatatatattatatattatatttttatattatatattatatattttatattatatattatattttatatttttatatatgttatatacaatatttttatattatatatatatttcttatatttttttatatataaaatatagtgactagagagagaaaaatgagggaaagaaatgccctgtcactagcatgccaaatcaagacttaactagtagagccagactcaattctaaaggcctgaaagtgcacacaagtacctttctagacctggaaatgactaggaaacataaggggaaaatggcctaatggtttaaaattcccagcttactatctcagtcactttgatattccattgctctttcttcctttttctttctctttattcttcaactttctcttgcataaatttgctctaatacccagctagaaaaaggaagttctacaactttgctttccctgccttaccctttgggagcctagcactctagtcaacttgagtttacttgccaagaaaacaccaaaacaccaagtactgggaaacaaaacacacagaaggcaatggagcaagacaaggtacagacaggacacctaagggtcacacgatcgaaagtcctttttggaattatgagtcataagggttcaaataatccttaactctactgtagactatataatttacaagtaactccactggacagtcttttaatgaatggagaaacgctctaaattctgccctacctcacaatgccatctaccaagagaaacttttctcttactgaattatctaaatttaatttggaaccaaacaaccttcaaggcaacggcataaatctctagagccactgtttttctttgctcggaatatatcatcatattcctgccccaagcccattcactgagatgaatgaagaccaacgaacatcaaattctttactgcaggggtttaattacactgggccctgctccaagcttgccattacttggagctggaactatcttactccattaggttggccacccaggctggcgcctgaaagttctaatggtattgaccttccacccagcagggagaagcaaagagtgaagtaacaggaatttcctggggcagttttgtttatgaaaataaacatgtttctttatgactaagtcacaacatcactaagcctcagtttctttcttgttaaataaggcctcatccatgcatgcgaaagcttcctctaaagaaaacttatgtacatgcctaagtcacagttcaccgagttcaaggtcatgtcctgactcatcagtcctgagtgcatggagcttagccctctcattcaaactgcagctcatgatttaccactagcagtcaccacatcatcacaggcccttcactggcatcacttttaatccagcaccctgggctcgagtggggcagaactgctaataatactatcagtaggaacaattaacaagacataataaaatctacacatatcaagcttggggaaaagggcagtagacagcagtatggattggtccatcatgaagcattctctgcttccttaaagctcaaccatcctttccatgagatgggatacaacacaggtgcaactgccagagctgtcagcaagtagaagggaggcctctctccagacatagacctgtaagctcacactccactacatgctagtgaagaatctgatccaaatgtgtagcacccagaatgtaaataatttatagctctctgccttggtggtacatgccaattgccagagacaaaaaataattctcaaatcatattcacatatatcatcttttaggaactccaggtataacaaacgtttgtgcctttaacctggagtagagagcctagggttctaattctaactttgtcacaaaccagctgtaattaggcaagtcatgtcacttctctagcctcggcttcctcctctgtaaaataagggaggtggcctggtttacctgtaagtcaaaggacctacaaactttttacatgttcccacaaaacctaaataattatctgctaacaaaatagattatgtgtgagggatctaccaattcactttctgatattctatgcaaagaaaaagagaaaatatgcatgcttcccctatactcgttgtattttctttctttttttatggccaaatcttgtagaactgtttctgggcaggtgatatgaagttcattcatctaaagaagttattcaaataaggcaaagtgatgaaaagagcatttggctgtgcaaccagacaggcctatgttcaaattctgccacctatcagcagcatgaccctaggtgagttactcagttgctatgaagcttaatttcatcatctataaaacagacaatacttctgtctcaggtttgctctgcagatgaaacacatatgaagtctctggcacacagtagtatggaataaatacaagcttccccctcttcctttttacatgactgtgcagcactagacaaatgccatctttgctctcccttttaaagcagcactggaagctaaattaggctctgctgagtcatttccattattctttaagaatgttcagaaaagctgactttgatttgcaagtcactatgtgttattaacgaaatactgtgttaagctgtataagctttagaaaaaagggttttgtttctcctggcttataaattctatttattcatacataattacaagaaagtggagaggttcttaaaacgtggacaaacattcaagcatgggcttttatactgaccagagaaaagaacttctcatgcattgtctaaagatctttacccattaaagaggagtgaagagcatctcccctcactaaaggatgcaccaccccacttaccttagatgagcacaaagaatccttcagcctactcttctaaaaacttcactattcctccatagttacttgaaagcactagttagcaaggcatctactcaacttacatttattcccaaagacagaccctggttcctctcacgtttctgatgggttaacagcgcaagagagatctgttgctgcttcttaatgccactccttccttcccctccattttgtaacccatgggattactacaagtcttacttggtacagcaataattacaattataacaacaataacattcattcggcactatgtgccatgctctgctccaaacaccttaaacttattaactcatttactcttcatatcaacactgtaacattaataccattattatccccacttcagagcagaactctgaaatatctttggaatatatcccctcctgaatatgccacaaaccctattcttctttcaatagacagtatcgatagcctcccaactggtacctgccttggtgcccaactccttacctctcaagacatcctccacactgccttcaattttttttctgtggtgctaagttcatcacagtccttgcttaaaatcttaactagtttgtttctttctttcttttggagacagggtctcgctctgtcacccaggctagagtgcagtggcacaatcatggctactgtaacctctatctctggactcaagcaatcctcctcccacatcagcctcccaagtagctgggacctcaggtacacaccaccatgcctggctaattttttttattttttgtggacacagagtttcactatgttgcccaggctggtttcaaactcctggactcaagggatcctcccacctcagcctcccaaagtgttaagattacaggtgtgagctaccatgcccagccttaactattttcttactctctataggatattacattcaaaatccttaacccacacaagagctttcacaacttgggtgccatgtcatttccactcttaactcctacctcttccttactctacctctttctaagtaccagccttaacaaattcctcactctcccctgaatacctcacaagtgacatttcctctgcgcagaatgctccctgcccccatttgccagcctggcacaaactcctgtcccttccagactgttcaattgtcagctcccttatcaagccttctgcaaccactacagaatttctcctctgggtacacactgcacttatctagtagcacttatctcacaacacggtacctatttctggaagaagtctatttcccacaccctagagtatgggatccttaagagtagagtccattgttggcacataatatgtcctatatgttatatatacctggtataaagtagacatttaataactagtgcatgaatcaataagacacaaaaacctgttcaaaactagtatctccaccgaaatgggacaatatatgaatcttgtaaatatttccttttcttactttcctacccaacttggtaggttttacaatcagaacttggggctttttacaattttccttacaaccaaagacaactatcccatcttcattctaaatcagttcaaaagataactacaaatcctacaactacccttaaacatgaaaaatcctaaattatacactaaagcttttatataaacattttcttcttcagtgactaatactaactggaaaaaaaatcctgcctgagggagttagggggatgcagacccattacccattctgcccagtgtaagcctccatgttacaatatgagcagaattatgtagtttctgcagctataactgattcaggttctctaggcagcctgagaaatcccctgttgcttcagatggatctataagccttcaaatgttccactgcacatggttttgaattaccgtttttcattactgatgtgctttctactggaccctgctgtgagataaagtggaattatagcagcattactagctaaaaaatgattgagagatatacaaggttgtaatatacttcttgaacttgcaggcaatgagacatctttgaatcttaatgcaagagacgaaagaatgaaaaaataaggtgcagcttatctgcagatcacacagatgaagaataccttgctaatgtctgtgagcagctaaatcctacattaaatactcaagattagggaactgaagcacagggatgatagtgataatgtctgcagtcaaacaatatttcttatataacagatgaacacaaagaaaggtgacttcagggaatgctatcctaaaaggtaaattcagttaacatgaagagccaagggtgaggtcaaggacaagtctgctaccaaacaaagaggaaaaagaggctgactgttttaaaggaagaaagaattatgttcaaggaaggatgatcagaaggatagaatgagacctgagcatagaaaagttgcctgttgtaccaaaaatgtgaccttcacaacaacgtttaacaatgaaaattaatagctgtgatagaattctcagactgacccctaatgaccttttaccctggtataatccaggttgtaggtggaccctgtggctgtgataatgtatgaatcctacaaattatattatgttctatggtacagcggactttaagagagagagattatcccaatgagactaatctatacccatgagctgtttaaaaagcagagtctttggctggtggcagaagtcagatctgacacaagaaggatttggtgaagccagagcagtcacgtgtcaaggaaacggcactttcagacatatagacacaaggatctgaattctgccaacaacctgaatgcacatggaagttgattcttcccaagagcctccagatgagataccagtctggtcaacatcttgattttggccttgtgagaccctaagcagacaacccagtccagcccactgggtcttccgacctgcagtactatgaaactaccagagaactgtgagatgatacatgggtgtggttttaggctgctacgattgtggtaattttttacacagcaatagaaaactcataaggtagggtaaactataacctgatatttcaacagaatctttcatatcagagatcccaaaagcacttgacgtatttgacataagctataaagaaaaataaatttaccttctcaaaaaaagaaataaacattaataatatcaattttttttttcagaagatgaagagtctcaccttcttaagtcctgaaccaggactgaaggcagacatcttaatgaacgtgtccttagataatatctgatccatatgacacttcttttcaacaattcgggaagagtatatgatttgaataataacccaagcaaaagtggaaagctctgctgcttgtttttgttgttgttgttgttgtttcctgagacaggatcttgccttgttgtccaggctggctaatttttgtatgttttgtagacacaagttttggttgcccaggctgatctcaaactcttgggttcaactgattcacctgccttggcctcccaaagtgatgggattacaggtgtgagccactgcgcccggcctgctgctcttttttaaaccctcaaatactgtccaaattattaccgaattccagtcaaggctgttctcacttgaaaatgcctgctgaaagattggtatagttggttagcagttggtcagttgattagcaagcaaccatcaaaatgtcttcaattgtttaacaggatatttttttcccattcaaataacttttcctcagtgacccctaggactgtcaactatttgttctattggattagagcagatgctagatcctacgcaacttcgtatcactgctctacttaacactgtggcatccactagctgtggcaccttaggcaagttactctctctaagcttccattccttcatcagtgaaatgagatataaatacctacctcatagggagggactgaagattaaacaaaatgaacataggagacatttagaacactgtctagcaaaatacaaagctcaatacatatttgctattttatacatcactcaattatcaattgagtgaataaaaacagtgggacactcaggctaatttacaatattatagattactagcagaaaaaaaatgcatgaacagcagctttattcataatatcccataagtggaaacaatccaaatgttccagtggtgaaactcaactatttttaaaaaaacataaaaatactaatgacagaaaagaaaaatactttaaaagaaccggccgggtacggtggctcacacctgtaatctcggcattttaggaggccaaggcaggtggatcacttgaggtcaggagtttgaaaccagcctggccaacatggtgaaaccccatctctactaaaaatatacaaaaattagccaggcatgttggcacatgcctataattccagctaaccaggaggctgaggcataagaactgcttgaacccagggagcagaggttgcagtaagccaaggttgtgccactgcactccagcctgggcaacagagcgagaccccgtcttaaaaagaaaaaaagaaaaaaaaaagaaccaaatggaacttcaagagataaaaaaataaaagagctacccaggcacggtggatcacacctgtaatcccagcactttggtaggcctaggcaggcagatcacttgaggccaggagttcaggaccagtcttacaaatatggtgaaaccttgtctctactaaaaatacaaaaattagccaagtgtggtggtgtgtgcctgtaatcccagctactcaggtggctgaggcacaagaatcacttgaactcaggaggcggaggttgcagtgagccaagatcgcaccactgcattccagcctgagcaacagaatgagactctgtctcaaaaaatatataaaaatcaaaaatcaaaattgataattccatcaaatgggattaacaaaagattagacacttcaaaaaaaaaaatcagtgaacttgaagacacatctatagaaactatacaacctgaagcagcctgggtgaggggatcagtcatacccaaacctcagcattataaaatatacccatgtaacaagcctatacatgtacctcctgaatctaaaatagaagctgattccaaagaattgagttcagttcaaggcagcttccctgttctgttaacgaaactttgggacattgaaatgggctacgggagatgattggttcaaaagcattattctattcatttgcctttttttttggagacagagtctcactctgtcaccaggctagagtgcggtggcacgatcttggctcactgcaacctccacctccctggttcaagcaattctcctgcctcagcttcccgagtagctgggactacaggcacgcaccaccacgcccagctaatttttgtatttttagtggagacagggttttaccacgttggccaggatggtctcgatctcttgaccttgtgatccacctgcctcagcctcccaaagtgctgggattacaggtgtgagccaccgcgcccggcctatttgcctctcatcttacaaaaatgcctgcttgagtctaatatatcaacagttaaagatgcctagaagagatgggactgaagaggctgaagacttactgagcttggactaacagacaagttacattcagttttaggaagtctggtctgatgaactaagataaaaagaaactgaattattttcatacatggttgcttttcagaaataaaaacaaaatagaagctgaaatttaaaaaacaaacagattttaacattataaaattggaaaaacaaaaattttgaacaataaaggaatatttaatttttttctttttttttcatgaaccatacatgagacttaaggaatatttaactatttttggaaaactgaagcagagaaaaaaaaacgtctggacagaatctcagtaacttgtgcaccaatatcaagtgattttttttttctgagatggtctcactctgttgcccaggctggagtgcagtggcaccatctcagctcattgcaaccttcacctcccgggttcaagcgattcttgtgcctcagcctcccgagtacctgggattataaacgtgtgccaccacacccagctaatttttgtatttttagtagagatggggtttcaccatgttggccagggtggtctcaaactcctgacctcaagcgatccactcacctcagcctcccaaagtgctgggattacaggtgtgagccaccgcacccggcctccagtattctgatacacatgtaatcagggttccagaaggagatgagaaaaaaaggaaagaaaagacattcgaggaaataatgactgaaaattatacaaaactggagtgaaacagcaagaaaggagactaggaagttctaggccctcattcccccatggacatatcaaataacaacatacagaccaaagtagcttaggaagaaccctaaaaaccagttaagaagttgcaggaaccaaacatacacctaaccatgaaaaggtcacacttcaaagtggtagaaaactttgtgccattttcattcatccttgccccactcaatctgtcccaccttgtcccaccactgggaagaagctacccaatttccagctcttccctcaggatggagcaaaaatagaactagcttcaatgttctggcttgtgtggggctgcctgagggactggttgctgtctcacctgacttggagggctaatgggaatggtggcatagtctggatatcaggatggaggccattgaaagcagtggcaggtgccacggcagggttgtttaacaacaacaaaaaaaggctagatactatatgggataaatatatataaggaaaaaagtctaaagaggactgtattatttttcaattaagtcaataatataaaattcagaaagggtatgaaaatgttcctgctaaaagaggttgaagagacataaaaacttaagctgggtatggtggctcacatctataattccaacattttgggaggctgaggccagaggatcacttgaggccaggagcttgagaccaacctggtcaacatagcaacaccctgtctctaaaagaaaaaaaaaaaaagagagagagagacaaaaaactaaatgcaatgcctgaccttaccctggatcttgtactgaggggggaaaatataaaggacagtatcagatcatatgccattaaagcttatactttcttatggtatattccttatactatctttatacaaatttttctacattgaaattatttccaataaaaaaaaaaggctgccagataagaatgacaaaaaatttcttttttttttttttttgagacagagtctcactctgttgcccaggctggagtgcagtggtgcaatctcagctcactgcaacctccacctcctaagttcaagcgatcctccctgcctccgcctcctgagtagctgggattacgggcacccgccaccatacagggctaatttttgtatttttgtagagatggggtttccccatgttggccagccttgtctggaactcccgacctcaggtgatccacccacctcagcctcccaaagtactgggatgacaggtgtgagccactgagcccaggcaacaacaaatttcttattagaaactatacctggccaggtatagtggttcacacctgccatcccagcactttgggaggctgaagcagttggattgcttgagcccagagaagtttgagaccagcctgggcaacacagcaaaggcccatctctacaaaaattagctgggcatgatggtacagacttatagtaccagctactcgggaggctgaggcaggaagattgcttgagccccagaggtggaggttgcagtaagctgagattgcaccactgcacttcagcctgagtatctgagtgagaccatgtctcaaaaaaaatgtttttcaataaaaaataaaataaagaaactataaatgccagaagacagtagaattatatgttcacagtcctagaagaataaactacttagaattctataatcagtaaaaatctttcaaaaaagaaggtgaattaaaaaatttttcaaacaaataaaagctgagagaaattatttcccacagatctgaactataagaaatgttaggctgggcacagtggctcatgcctgtaatcccagcactttgggaggctgaggagggcagatcgcctgaggtcaggagttggagaccagcctggccaacatggtgaaaccccatctctactaaaaatataaaaattagccaagtgtggtggcatgcacctgcagtaccagctactcgggaggctgagacaggagaatcgcttgaaccggggaggcggaggttgcagtgagccgagactgcaccactgcactccagcctgggtaacagagccagactccatctcaaaaaataaataaataaataaaaccctcaatccaaaaaaaaaagcggtacaaagaagagatgaacagaaacaaacaaaaaagaacaaagaagaccaaaaaaaaaataaagaagagacagaaagaaacaaaaaataagatggtagatttaaactcacccatagctagaattacattaaacgtaaatgttctatctactccagttaaaaggtagagatgtcagactgcaatttaaaaataagaaacaatacctaactatatgctgtctaaaaagaaacctgttttgaatataaagatacaaatatgttaaaagtaaaaggatagaaatagatatatagtgtaaacactaatcaaaagaaggttagaatggttatattaacatcaaaaaagtagaccagaacaaggaacattatcaggaatagagaaagatatttcataactataaaaggatcttatcaagaaggtgtggaaaaaactggtagaactgaaaagagaaatagatgaatccacagttacaggtggagatttcaacactcctctctccgcaactaaaagaacaagtagatacaaaatcagtatggatacagaggttgcagtgagccaagatcacggcacttcagcctgggtgacacagcaagactctatctcaaaaaaaaaaaaaaaatttataacacaatagtaagaaacaaaaaaaattttaaataagcaatatcacgcactttttaaaaaaaggttaaaatggtaaattttatgttatgtatatttcaccataaaaagaaaagctaaaataccatcaacaacaacaaaaatagacaaaatatttgaacaggtacttcacaaaggcagatacacaaatggccaatgagcacatgaaaagatgcttcgcagtatcagccatgagggaaatgtatataaaaaccacaatgagctaccatgatgagatgcctactagagagggttaaattaaaataagatagacaccactaagtgttggtaagaatgtggagcaacctaaactctcacacatcatttgtagcagtgtaaaagggcacaaccaccttgggaaaagatctgacagtttcctattaaactaaacatacacttgcacataatccaacaattacactattaagtatttacccaagaggtataaaaacatatactgaacacaaagatttctgcacaaatttataatagccaaagactagaaaccatccaaacatctatcagagttgaatagataaagaaatctccagctataaacaatccaaacatctatcagggttgaatggataaagtggtacattcatgcaaagaaataccactcaacaataaaaagcagcaaactcctataacacacatgactgactcccaaaaatattaatattgaaccaaaaaaagtcacacaaaagactatatatcatataattccattcatttaaaattctagaaaagggaaacctaatagcaacacaaaatagattagtggttgcctggaatcagtggtaggaggtgaggggatggagtggggatcaactgcagaggaaagaaatatttgagggtgacataaatattcaatatcttgtttgtgatggttgttacactggtgtataccttcatcaaaactcatcaagccatattcttaaaacaagtgcattataatgttgtatataaagtataactcattaaaactgacttttaaaacagaatggaaaaaactatgaaaaaatttaaagtttgcattcccttaacccatgttattctacctcttagaatttatcccaaagaaaccaggagtcaaacagaaagatgcatgtacagatgctcactgcagtgttatttaataaaaataatttcctctaatgttccatcaatagaggattgattaaataaactaaggtacattcacagaatacttcacagcaattaaaaatgggagttagcttctaatgtatggacctgaaatatcatacgtattaattaaaaaagtaatataatataaaatataaaagaatataactgtttttgttttttttttgtagagacaatgtcttactacattgcccaggctgaactcctgggcttaagctatcctccctgactcagcctcctgagtagctggggtgcccaccactgcacctggagaataaacatatattacaaatatatatgtgtattcaaaaaatttatgagccaggagattttgtaccaagagatgctatctttttcttatgctattaagcaagggaatgttgagatcatccctattttagagatgaggaaactctcagagatgacaaatgagtttcagaggagccaaaagaactgaaaatcccacagtctctcagaaaacaactgctatctcagtgaacaggtatttgctcttcaaatcttgtagaagagaactcacataaattgaggtaataaatgcagagtactactggaaagtgcctacaggctttcatagccatcttcgtgtcattctaacatcagaatgaaacttactaaaaatctcttccatataatctagataatggtcccttactgatttcctctttaatgctgtgcttatttccagctgttatcagggccgaatttgaagacagaaaagagactatgttaatacgcagtctccctgaaagcaggaaggaagtcctttggactgattaaggccagcatgacgttcacagcgaacaagctcattctggcgaaatcaaagcagtaattccagtgtttgttccctgtcagccatgtcagcagccaaaaaaaaaaaaaaggaagaaagcggatgcacatgcacatgcccagaaaaaaaaaaaaaaaagactaacttattacacatctgcttgtcttatacctggtatttgtatccttccaaagaatatatacaatgactgagcttcaactagtttgcatttaccagttaaaataatttcaaaacttagcccctactccccaaaacagtactgggctatactgaaacctcagcgttcctgatctcctaccccaccctccattcccactaagaacgaagtcatcttgttatgaaatgttaaggagaaaaatgattttctgatggttcagtgatattaacatccacatatatgtattttcctcatagatatggccttatttaagtacataaatgcaaagttagtcacttaaaaactagttttacaaggccgggcacagtggctcacgcctgtaatcccagcactttgggaggccgaggcgggtggatcacaaggtcaggagatcgagaccatgacggctaacacagtgaaaccccttctcttaggccgggcgcggtggctcacgcctgtaatcccagcactttgggaggctgggccaggcggatcacgaggtcaggagatagagaccatcctggctaacacggtgaaaccctgtctctactaaaaatacaaaaaattagccgggcacagtggcgagcgcctgtagtcccagctactcgggaagctgagacaggagaatggcgagaacccgggagacggagcttgcagtgagccgagatcacgccactgcactccagcctgggtgacagagcgagaatccgtctcaaaaaaaaaaaaaaaaaaaaaaactggttttacaaatacaaaaatcaaccaggtgtggctgattaaacttattaaaactgactttttacagttagaggtggtgggcatctgtagtcccagctactcgagaggctaaggcaggagaatcgcttgaacccaggaggcagagcctgcagtgagccgagatcaaaccactgcacttcagcctgggtgacagagtgagagtctgtctcaaaaaaaagaaaaaaaaaattggttttacaattctacactaagctcaggccatctcttgtatgtgcccaatctgaatctattcacctacatagccctcttcataaataagcaattttactaattctcaccccatacaccacaaaagtacttggtttctaatacttcttctttttttttttttttttttttgagacagtctcgctctgtcaggctggagtgcagtggcatgattgtggctcactgcagcctctaccttctgggttcaagcgattctcctgcctcagcctcccaagtagttgggtttacaggtgcacaccaccacgcccagctaatttttgtatttttagtagagatggggtttcactattttggccaggctggtctcgaactcctgacctcaagtgatccacccacctcggcctcccaaagtgctgggattacaggcatgagccaccacgcccgacctggtttctaatacttctaacactgcatatccatctctcactgtattctaacacctaagactacctttagcaatatgaacctgatcgaaaaaaggaaaagaaaaggaaaaggagaaagggaaagggaagggaagtaaggaaggaaagaaagaagaaaagatcttgtaaaagttttcacccaaaacattttcactttgccacaactttcaaagctaccctttatctactcttcacactccaaataatactaacaactttaactcgcagtaaagtatagcaggagtagcaactaccatttattaaatgcttattatgtatcaagtaccatgctgagttctttatgtcatctcatatatttattttgagacagggtctcactctgtcacccaggctagtagtgcacaatcatggctcactacaggcttgacctcctgggcttaagcatcctcccacctcagcctcccgagtagttaaaactacagatatgtgccaccactgcgagctaattttttatctgctgtagagacagggtctccctaaattgcccagggcagtcttgaactcctgggctcaagcaatcctccagcctcggcctcccaaagtgctgagattagaaggcctaagctacctcatccagcgtgtctctcatttaatccttcctacaaccctcccaagtaggctataaagatttggagaagttaggccaggcgcagtggctcacggctgtaataccagccctttgggaggccgaggcgggcggatcatgaagtcaggagatcgagaccattctggctaacacggtgaaaccccatctctactaaaaatacaaaaaaaaaaaaaattagccgggcggggtggcgggcgcctgtggtcccagctactcgggaggctgaggcaggagaatggcgcaaacctgggaggcagagcttgcagtaagcagagatcgagccactgcactctagcctgggcaacagagcaagactccatctcaaaaaaaaataaaaataaaaaaatatttggagaagttcatttgtccaagtccacatagactgaagaactcaaaatcagaactaagtccatctgtctgaagaaccaaagatactgttcgggtggggtggctcacacctgtaatcctagcactttgggaggccaagacaggtggatcacctgaggtcaggagtttgagaccagcctgaccaatatggagaaaccccatctctattaaaactacaaaattagctgggcatggtggcgcatgcctgtaatcccagctacttgagaggttgaggcaggagaatcgcttgaatctgggaggcggaggttgcagtgagccgagatcgcaccactgcattcctgcctgggcaacaagagcgaaactccatctcaaaaaaaaaaaaaaaaaaaaagaaccaaagacatgaaccattgttctattttattccaaatgcttttatttctgtcttcactataagattaagaaagtacagcctttctgtctggcggcagccatcaggtaagccaagacaagtgcacacaagtatatccaggagctacggagaaagaaacagtctgatgtcatgtgctttcttctgagggtccactgctggcagtaccgccagctctctgccctccacagtgctccccaccccacccagcctgataaagcgcagcaactgggctgcaagaccaagcaaggttacattatatataggattcatgttcgctgtggtggccgaaaacacccagttcctaagggtgcaacttacggcaagcctgtccatcatggtgttaactagctaaagtttgcctgaagccttcaatctgttgcagaggaatgagctggatgtcactgtggagttctgagagtcctgaatttatatttagatctatgacttaaatattggattggtgaagattccacatacaaattttttgaggttatcctcattgatccagtccataaagctatcagaagaaatcctgacacccagtggatcaccaaaccagtccacaaccacagggagatgcgtgggctgacatctgcaggccgaaagagccgtggccttggaaagggccataagttccaccacactattggtggttctcgcagggcagcttggagaaggcgcaatactctccagctccaccattatcgctaatataagtaaagtttgtaaaattcatacctaataaacaatttaagacagtcatgtgtgcttacaggtgttatttgtctgttaaagctagtctgcaaattatttaatgaatgctttgtcaaattaagacagttaaagtgaaggccgggcacggtggctcacgcctgtaatcccagcactttgggaagccgaggaagacagatcacgaggtcaagagatcgagaccatcctggccaacatggtgaaaccccatctctattaaaaatataaaaattcgctgggcgtggtggcaggtgcctgtagtcccagctactctataggctgaggcaggagaatcgcttgaacccgggaggcggaggttgccgtgagccaagatcgcgccattgcactccagccttggcgacagagcgagacgccgtctcaaaaaaaaaaaaaaaaggaagttaaagtgcaataatgtttgaagacagtaagcggtggtgtatcttgtttctttttttttgagacagagtctcgctctgtcgcccaggctggagtgcagtggcgcgatctcggctcactgctacctccgcctcccaggttcaagcgattctcctgcctcagcctcccgagtagctgggattacaggcgcccgccaccatgcccagctaattttttttttttttgtatttttagtagagacgaggtttcaccatgttggtcaggctggtctcaaacccctgacctcgtgatccacccacctcggcctcccaaagtgctgggattacaggcatgagccaccgcgcctggctgttgtatcttgtttctaataagataaacatttttgtctttgctttatcttattagggagttatatatcagtgtataaaacatactatgtggtataataggtttaaaataaattctttaaaagaaaaaaaaagtatagcatggacatacatatgtaaaaaaatgaaccatgacctaaatattgcatctcgtacaaaaaaattactgaatcatagatctaaatataaaaaaccaaaaccataaacattctaaaaagaaaaccttcatatttgagggttaggaaaaaaaattttctttttttttgagatggaatttcactggttgcccaggctacagtacaatggcgtgatctcggctcactgcaacctccgcctcccaggttcaagcaattctcctgcctcagcctccctagtagctgggattacaggtgcccgccaccatgcccagctaattttttgtatttttagtagagacggggcttcaccacgctggccaggctggtctcgaactcctgacctcaagtgatccacccacctcggcctcccaaagtgctaggatcacaggcatgaaccaccacgccggccaggaaaagattttttagacataacattaagagtacaacccataaaaaaaaaataaactagactttatcaaaatttaaaacttttgctctacaaaagacacgaataagagaatgaaaagacaagctacagattaggagaaaatatctgcaaatcacatatcctcaaaaggacttgtatcaacaatatacataaagaaccctaaaaactcaatgataaggaaacaatctggcagggcacagtggctcacgcctgtaatcccagcactttgggaggctgaggcaggtggatcacgaggtcaggagttcaagaccggcctggccaatatggtgaaaccccatctccactaaagatacaaaaaattagccgggcatggtgatgcatgcctgtaatcccagctacttgggaagctgtgccagaagaatcgcttgaagccaggaggcgaaggttgcagtgagccaagatcgagccatagaactccagcctgagtgacagggcgagactccgtctcaaaaaaaaaaaaaaagaaagaaagaagaaaagagaacaacccaattgttgttgtttgttgagacagtctcactttgtcacccatgctggagtgcagtggcaccatcttggctcactgcaacctccatctcctgggatccagtgattctcgtgcctcagcctcccgagtagctgggattacagatgtacaccaccgtgcctggctaatttttgtatttttagtagagatcggatttcaccctgttggcaaggctcgtctcaaactcctggcctcaagtgatccacccacctccatctcccaaagtgctgggatcacaggcatggggcactgccccccgccaaacaacccaattgtaaaacaggcaaaagacatgaacagacaccttaccaaagataatataaggatggcaaaaaaagcacatgaaaaaatgttcaacatcattagccattaaagaaatgtaaatcaaaaccacaataagatgtcactacacagctattagaatagcaaaaataacaaatagtgataatatcaaatgctagtgaggatggagaacaactggaattctcataaattgctgttgggaatgcaaaacagtacatgcattctgaaaaacagtttggcagtgttttataaagttaaatatacacctaccatacatcacagcaaccccattcctgggtattttactgtaaagaaatgaaaacttaggttcgcacaaaaacccatacacaaatgtttacagcagttctaatcatagttgccaaaaactgcaaaaacccaagtgtcctccaatgggtgaatggagaaacaaattgtagcatatccataaagtagaatattacccagaaatagtaaggaacaaactcctgagacacacacaacttggatgaatctcaaaagcactatgttgagtgaaagaagccagttacctactgtatgattccatctatatgacattctcaaaaagacaaaactacaaataataaacaaaacacacacacacacacacacacacacacacacaccacacacacacatgataaaactacggtgaagaagagctcagtgattgccaggggttgtgggtgagcaagaggtgactataaagggagagcatgagggagtttttggggtggaactattctgtatcctaattgttgtggtagttacagaaatctaaacatgttttagaattcatagacatgtataccccaaaaaagtccattttaattataataatgttgaagataaaattgaaaaaatttaattcttcagaggataattggctaaataggggtttaaaaagttaaagtcttacctcttactgtatatcaaaacatattctaaattaactaaaaagctaaatgtaaattatgaaataatactgatttttttttttttttttgagacatcactgtcgcccaggttggagcgcagtggtgcgatctctgctcaccgcaagctccacctcccggattcacgtcactctcctgcctcagcctcacgagtaactggggctacaggtgcccgccaccacacccggctaattttttttttttttgtatttttagtagagacggggtttcaccatgttagccaggatggtctcaatctagagacggggtttcaccatgttagccaggatggtcttcatctcctgacctcgtgatctgcccgcctcagcctcccaaagtgctgggattacgggcatgagcccctgcacctggcctgatgttcttaatatatatgatgctcctacaaataaatttttaaaaagaacactcccaaagaaaaatgggccaagacatgaataaacaaaatacaggaaaatgctttatctcacaaataattgaataaataaacagtaaagcaatgacacagtattttttgtcaactgaaatacaaaaaaaaaaaaaccaaaaaccttaaaagaatgataacatccagtactggcaaaagtgggaaaggaaacctaaagaaaactctagtttggagcataaagtgctataagatttcctgaaggtaatctggatgtctatacatgttgaaaaattcatacatccacatatactgttttttcacttctagtgaaaaaacagtatatgtaaaataaacagtataagtaaaataacccactagtgcagaaaaatgtattcagcactcataacaaaatagaaattaaaaaagttaaataattacatatccatataatagaacagtaggtagccattacgaaaccaaatcacctgaacagttaatgaaatcagatttttgttttgttttgtttttgtttgttttttgtttttgagacaagtttcgctcttgttgcccaggctggagggcaaaggtgcgatctcggctcaccgcaacctcagcctcccaggttcaagcgattctcctgcctcagcctctcaagtagctaggattacagatatgcgccaccaggcccggataattttgtatttttagtagagacggggtttctccatgttggtcaggctggtctcaaactcctgacctcaggtgatcaacccacctcagcctcccaaagtgctggtattacaggtgtgagccaccatgcccggcccagattatgttattttagtcatcactgctataatttcctacttgttctcacgaagtaggttttgtgggttttttaggttttgtgtgttttttgctgtgtttttttttttttttttttttttttgagacagggtctggctccattgcccaggctggagtgcaataatacaatctcagttcactgacacctccacctcctaggctcaagccattctcccacctcagctcccaagtgactgtgactacaagcacacaccatcatgcctggataatttttgtattttttgtagagacagggttttgctgctatgttacccaagttggtctcaaactcccaagctcaagcaatctacctgcctcagccctccacaaagtgttgtgattagaggcatgagccaacatgccagccaagatttaggtctttcttcaatgacaaaacaatgttcatggtagaatgattacgctttcaaaaaaactagaatataagattatatacaagctaaattttattttattttatttattttttttttgagatggatttttactcttcttccccaggccggcatgcaatgaagtcaggagttcgagactgaccagcctgaccaacatggagaaaccctgtctctactgaaaatacaaaattagccgggtatggtggcgcatgcctgtaatcctagctactcaggaggctgagataggagaattgcttgaacccgggatgcagaggttgcagtgagccaagatcgagccattgcactccagcctgggcaacaagagtgaaacgctgtctcaaaaaaaaaaaaagtatgtgagtgtacagacacattgatacacacacatatatagcaatcatgtaacagcatctctcagtagtggaattatggatgattttttattaatcttttctgtattttctaaattttctataataaacatattgctttcatacttttttgaatcaatatacattttttaaaatcaactaactgatatccaaaatgagtttaaaacttgttttctaatctggattatctgctattatcctggtcacaagcatttcactgttatctaagtatggcaattctacatgcaaatttgtcttttagttactaatcccaaatgagccatgaccgcccaaagtcagaagatctacagataatggcatctcattaacattaccacccaaaagatgcagaatagtgtgtctattaggatgagccatttgtgtcttaaatctttttttttttttttttgagacagcatctcactctgtctcccaggctggactgcagtggcacgatcttggctcactgcaacccccatctcccaagttcaagcaattctcctgcctcagcctcccaagtaactgggattacaggcacatgccacctcacccagctaattttttttgtatttttagtagagacggggtttcaccatgttgcccaggctggtcttgaacgcctgacctcaagtgatctgcctacctcggcctcccaatgtgctgggattacaggcatgagccactgcgcctggcccgatatgtgttaaaattttttaaagacatttctgtaatatatagaaacttatgagctgatatgtccatacactttttttttcagttcaatataagaagccaaaagaaatagttatcttttttggtgggggaagaagtttataactccctactgtttgatttatgaaccatttttgtattctttttatatttaactttttttttaaccttcttgctttgtttgcacttaccatggagcacttcgccagtacttcctcctggaatctcaggaatccttcctgaacctcaacttcattgaggaaaaaggcaaggaagtgagtgaagggctgctttcttcgaaaagtgtccaaaagaacatcaatccgtgttcgggctgaaattacaccatttcgatgctggccagtgattactgtaaacaaagaagaaagggtaaactgctcaaggacccccaaatgcttataaaacaggacctcttgatactgtcacctctgaggagctaaagcagttctgaatgcgtatatgaatctaaacaggggacaataacaaatataagaaaactgctaattaattcaatgtaagcagaatgaggcttaaaaatagaatatccttggccgggcacggtggctcattcctgtaatcccagcactttgggaggccgagacaggtggatcacgaggtcaggagatcgagaccatcctggctaacacagtgaaaccccacctctactaaaaatacaaaaaattagccagcctggtggcgggcgcctgtagtcccagctactcggaaggctaaggcacggatggagggaacccaggaggtggagcttgcagtgagccaagatcgtgctactgcactccagcctgggcaatagagcaagactctatctcaaaaaaaaaaaaaaaaaaaaaaaaagaatatccttaagacagcttataaagtagaaaaatgaattcaagtactacaaagcaaacccttgctagtaggaatgtaaaatggtgtagtcactatgaaaaagtttggtaattccttaaaaagttgaacatagctgggtgcagtggctcacgcctgtaatcccaacactttgggaggctgaggtgggcagatcacttgaggtcaggagttcaagaccagcctggccaatatggcaaaaccccatctctactaaaaatacaaaaattagctgggtgtggtgtcacatgtctgtaatcccagctacttgggaagctgaggcacaacaatggcttgaactagcaagctggaagttccagtgaactgagatcacgccactgcactccagcatgggcaacagagctagaccctgtctcaaaataaataaataaataaataaataaataaagttgaacatagacttaccatataacccagaaattctacccttagggatacccaaaataagtaaaaaccgagaaagaaaaagggaagggaagggaagggaagggggagcagggaaggggaggggaggggggagggggaacgaggaagggaaggggaggggggagggagaggggaggggaggggggagggagaggggaggggaagggggaggggacggaacgggtgaggagggaggggaggggagggaagggagcagatggaaggggtgaggagggaggggaggggagggaagggagcagatggaaggggtgaggagggagaggaggggaggggagggaagggagcagatggaaggggtgaggagggaggggaggggaggggaggggagggggaggggaggagaggggaggggaggggaggggaggggagggggaggggagggaagggaagggaagggaagggaagggaaggaaggaaagaaaagaaagaaagaaggcaaggcatgctcatgcctgtaatcccagcactctggggcaaaggccaaggcaggaggattgcctgaggccaggagttccagacagcctaggcaatttactgaaactctgtctctacagtggttggaggtggagaagcttctgatgttccattgcctgagatttcaaaacagacaagaccagatccttgtctagaggattaaaagctaccagatcatttccttctctgatttctctaatttaggagacacaaaagaaatgggtaaatcagagcaaatatcacacgaatgcaactgcagacttgacttcacatcacaattcaatttactctaaccaatacatttggtttttctatatactttacttctctacaagatcaataagccagtttatttattttattttcaagagagtcttgctctgtcacccaggctgcagtgcagtggtacaatctcggctcactgcaacctccgcctcccaggttcaagcgattctcctgcctcagcctcctgagtagctgggattacaggcacgtgccaccacacctggctaatttttgtattcttaggagagacagggtttcatcatgttggccaggctggtctcaaaatcttgaccttgtgatccacccaacttggcctcccaaaatgctaggattacaggtgtgagccaccacacccagctaattttgtatgtttatttttattttttgagatggagtcttgctctgtcgcccaggctggagtgcagtggcacgatctcggctcactgcaacctccatctcccaggttcaaacaattctcctgcctcagcctcccaagtagctgggaatacgggtgtatgccatcacacccagctaatttttttttttttttttttttttttgagacagagtctcactctgtttcccaggctggagtgcagtggcacgatctcggctcactgcaacctccgcctcccgggttcaagcaactctcctgcctcagcctcctgagtagctgggattacaggtgtgcaccaccatgccctgctaatttttgtattttcagcagagacagggtttcaccatgttggtcagactggtctcaaactcctgactttgtgatgtgccctcctcggcctcccaaagtgctgggattacaggcgtgagccactgggcctggccggctaattttttgtatttttagcagagacgggatttcaccgtgttagccaggatggtctcaatctcctgacctcatgatccgcccaccccggcatgagctaacacgcctgcctagtttttattttctcttctttgttttctgtttttttgtttgttttgagacagtctcgctctgtcacccaggagggagtgcactggtgcgattggctcactgtagcctcgactttcccagataaaaagatcctcccacctcagcctcccaagtagctgagactacaagcatgtgccaccacacccagccaatttttgtatttttttgtagagatggggttttgccatgttgcccgggctgaccttgaacacctgggctcaagtgatcctcccacctaggcctcccaaagtgttgggattacaggcatgagccaccaagcccagcctgacacactagtttttcacactgcaacatttgtgctaagttaaaatggagtctttatagcctgtctacccttttctggataagttctggaatgaatctagtatattaaaatggctagggtctccacatttacaccacgttataattttactgcaataaaaaatattatataacttactacacaaatagaaaaaatggggaacatataacaagtgttaatagcaattatgtttggggttcgtattataagagacttccatgtataccttatatataatttctgcaagctttctcttttttgaaagcatgtattaattttataatcagaaaaaattagggctgggcgcagtggctcatacctgtaataccagcactttgggaggctgaggctggctgcacctgaggtcgggagttggagaccagcctgatcaacatggagaaaccccatctctactaaaagtacaaaagtagccaggcatgatggcacatgtctgtaatcccaactacttggtaggctgaggcaggagaatcacttgaaaccaggaggtggaggttgcattgagccaagattacactaagccaagatcatgccaatgcactccagcctgggcaacaagagcgaaactccatctcaaaaaaaaaaaaaaatagatgaagtaacttttaatgcaattataaaatgaccttggtatttgtaacttgaatgttaaaactcaaggaaaataaaattttgcacttataattctaataaactgaatatttactttaataaaagtccttccaaatgctgttaaaagttctaatgctagagtttgttgacattacctagagaaaactgtgtcactgcactggccaatatgggagcccacatgcagctagttagttaaattaatcagaattcagtaaaagtaaaaattcagaaaaaaaaattcagttcctttcatactagcaatatctcaagtactcaaagtcatacgcatgaccagtacctgacacgtgcggctcctgtgctacactgcatggatatagaacattctcatcaacacagaaagctctttgggacagcactgttgtccaaaaagtcaattgctacttatctgctgtcaaggtgattattcttttgtgtgtgtgtgtatgacagggtctcactctgtcacccaggctggagtgtggtggcatgaacacagttcactgcagcctggagctcctggtctcaagtgatcctcccacctcaatctcccacagtgctggaagtacaggtatatgccactgtccccagtcaaggtgattattctcacataacataaaatgaaaaagagtacttataattttttatgcaaaaacaatacaatctatgaacatttatggaaaatggggctagacgcagtgactcttgtctataatcccagcactttgggaggccaaggaggatcgctcaagcccaggagttcaaggccagcctgggcaacatagcaagaccccatctctacaaaaagtattaaaaattagctgggcatggtgctaagcgcctgtagtcccagctacttggaaggccgagggaaaagtattgcttgagcccaggagttcaaggctacagtgagctatgatggagccaatcaactctagcctgggcgacatgctcttgcctgtaaccccaacactttgggaggccaaggcaggcagatcgcttgagctcaggagttcaagaccagcctgagcaatgtggcaaaaccttgtctctacaaaaaatacaaataaattagccaggtgtggtggcgtgttcctgtagacccagctatgcaaggctgagatgagaggattgattgagtccaggaggtagagtctacactgagctgtgatcatgccactacactccagcctgggcaacagagactctgtctccaaaaataaaataaaataaaataaaggactaaaaggccgggcatggtgtctcatgcctgtaattccagcaccttggaaggctgaggcaggcagatcacttcaaaccaaaaattcaagatcagcctgggcaacatggtgaaatcctgtctggataaaaaataaataaaaatttttaaatgaaaaaagaaaaagaaaatgggttaatgaattattggaggttgctgcactctttgactttaaaaaagttccatcggccagacatggtgctcacgcctgtaatcccagcactttagaaggccaaggtgggtggatcacttgaggccagaagtttgagaccagcctggccaacatggcgaaaccctgtctctaccaaaaaatacaaaaattagctgggtttggtggcacacacctgtagtcccagctactcgggaggctgaggcaggagaatcgcttgaacctgggtagcggagattgcagtgagctgagattgcacctcagcactccagcctgggtaacacagcaagactctgtctcaaaaaaaaaaaaaaaattccatccttccagaatgagtttacagttttgtcctaacaatgcccctcactcaaagccattgtacatacaacaaaagcctatgcccttggtttacactgaggcttggtacagacactttctaacttgatttatactgctaaactatttttccttatcagaacagttatttgagtcaagttatattattttaatcattactcttataatttccttcctagtctacaaaatcaagggtaaaaaattgagagcacaatggaaaaggctgaactttattttatattcactgatctcattgattttctctaattctaattggaaacaattcacaaatccatttcaagttaccaaagcatgaaaagaaatctcctaatacacagtgaaatctggaagctttattccatcaatgtatggtaaagtataaaattaaggcccaggtactcaatcaagataaggttatataattccatctttcctcatttgggagactggtactgataaaccataaagacgcccatagctggccgggcacggtggctcacgtctataatcccaacactttgggaggccgagaggggaggatcacctgaggtcaggagttcgagaccagcctgaccaacatggagaaaccccgcctccactaaaaatacaaaattagccaggcgtggtggcacatgcctgtaatcccagctactagggaggttgaggcaggagaatcgcttgattccgggaggcggaggttgcagtgagccgagatcacaccactgcactctagcctgggtaacaagggcaaaactccgtctcaaaaaaaaaaaaaaagaaaagaaaaagcccatagctagaaccccacagaaaacatagttactaaacactgcagttggttacattattccataaacatgcaaaagtgacttcaaatgtaacttatatctactgagtctcaccaatttccccgtcttgtccaggtttaggaatgctaatagaagttttggtctccatttctattttcttcctagtgtcccctctctttccaactatatgcctgtaacataaagtaattaaaagaagattaagtcaaaatgtaccaaaataaagaacctcattatgtttaaatcctttgtgacaagagatactcccttacagaaaagtagttcagtaaaagctcaatatttgcggaagaaattacaagtcatctagctttagaacatgctgcagtaaagtcattggcaaagatgagtttttggccctatagccaattcaatgcagagatagaaaaaccatgcccaacacccgtttgcttctcaaaatgagatttaaaatctgggtctgcaataaagtgaaagaaaagctggccagcaggtgcagtggctcacacctgtaatccctgctactcaaaagactgaggtgggagaactgcttgagaccaggagtttgagaccagcctgggcaacagagtaagaccccgtctctaaaaaaatattttaggctggcggcagtggctcacgcctgtaatcccagcactccaggaggctgaggtgggcagattgcctgaggtcaagagttcgagaccagcctggccaacatggcaaaaccccatctctacaaaaatacaaaaattaactgggtgtgacagcagggtgcctgtaatcccagctacttgggaggctaaggcaggagaatcacttgaacccgggaggtggaggttgcagtaagctgagatcgcaccactatactccagcctgggcgacaagaacgagactctgcctcaaaaaataaatttttttttcaatttttttcaatagaaaaattagaatatctgaggactcatggcaacagcgagctacagccaactctcgactaccccatgaagacgggacatgagctcacaatccccatcactcccacttaaatcacttattgactcatttacattacttgcctggacttccaagtataaatattctgacaatccaaagttatcttctggaacccacagtcgtttgatgtgttcaagtgaatgagactaccgaatcccaagagagaagtttcagagtctataaagcactaagaggccatcacagggctatcaagttaagaactccttgtcatcaacgttattttaacctctatgacttcaattacagtacccaattctacggatgactatgtctaaaactattcgttagtttttgcgtgggataagaaagcccaattacttcccttaagatctattatagtaagccagtttttaaaaataagatgtttagaggaagattggaagtctgtaatttccaagtggttttcctgtgtgttgggatagagattgtagggcaccaaactctgtgaggtctttgttttcccaccttaccaattaggagtgctttctgtcaggctccagtttgttactatgtggctagtgaacaagcctatcacaaaaagcagtggttcaaagtgctattaataatctaggcttcagcaccttagaaagcaaagtggttgaggtttaaaaggctttagaatcaaacaaaccttggaattcatataaccactgtaagcctacttcttcacttatcaaaatgaagtgagaggctgacgcagaaggatcccttaagcccaggagttcaaggctatggtgagctatgatcacacagtggcactctggcctgggtgacaaagtgagatcctgtctctaaaaaaataaaaataggccaggtgcagtggctcatgcctgtaatcccataatttgggaggcagaggcgggcaaatcacttgaggtcaggagttcaagaccagcctggccaacatggcgaaaccctgtctctaccaaaaatacaaaaattagcaaagccaggcaaggtggctcaatgccgggtgcggtggctcacacctgtaatcccagcactttgcgaggccgaggtgggggggatcacctgaggtgaggagatcgaggccagcctggccaacatggtaaaaccccatctccactaaaaatacaaaaattagccaggcgtggtgacaggtacctgtaatcccaactactcgggaggctgaggcaggagattgcttgaactcgggaggcagaggttgcagtgagccaagatcacaccactgcactccagcctgggtgacaagagtgaaactccatctcaaaaaaaaaaaaaaaaaatagcagggtgtggtggcgggcgcctgtaatcccagctacttggaaggctgagcaggagaattgcttgaacctgggagacaggggttgcagtaagcagagatcgcaccactgcattccagcctgggcgacagagggagactccgtctcaaaaaaataactaaataaaattaaattaaatttggctgggggtggtgtctcacgcctgtaatcccagggaggccaaggtgggtggatcacctgaggtcaggagttcaagaccagcctggccaacgtggtgaaacaccatctctactaaaaatacaaaaattacccaggcatggtggcagatgcctgtaatgccagttactcgggaggctgaggcgggagaatcacttggacccaggaggcagaggttgcagtgagctgagattgtgccattccactccagcctgggtgacagagcgagactctgtctcaaaaacaaaaaaaaaaagaggccaggcatggtggctcacgcctgtaatccctgtgctttggaaggctgaggcgggtggatcacctgaggtcaggagttggaaaccagcctaaccaacatggagaaaccccacctctactaaaaatacaaaattagccgggcatggtggcgcatgcctataatcccagctactcgggaggctgaggcaggataatctcttgaacctgggaggcagaggttgtggtgagccgagatcatgccattgcactccagcctgggcaacaagagcgaaactcccgtctcaaaaaaaaataaacattaaattaaattaaaatggaatgaataatacctatttgtcataaggttgtcgtaaggattaaatgtgatcatatatgaaagagcttcccaataagtggcacagagctccatacagtccatgctgtagggcagatgcccctaacgttagtagattaagcataccgggagaaggaccctgacagtaataacttaagcctacctgagaatcaccctatgatctaaaaggaattatgtgttcagagttccaaactacggaatccggcttggattcattccaacccagagattcattcctttatctatgaggaacatctgaatccctgacccgtttatggaacccaggccatacagaggattgaggccctttgttttggattaaataaaggttgccaggtgatggctgctaggggcagggtgctaagtggaaatgttatataaactgtatgctttttccaagcagttgaagttctgtccagcccaccaccacagcaccaccctttatgcaagtcccctcaataaatcctctgtctcatttgctggctctgggtctcttccccagcctctctaacatggtgccatccccatcaaagtcaacaggtgtgcggcatgacatatgctatcctcattaaacctatactggcaccttttcagttaaaagtataactggacagaaaagaggtttacatggaaaatctaaaatactcactataggccagacacagtggttcatgcctgtaatcccagcactttgggaggcgaggcaggcagatcacctgaggtcatgagttcaagaccagcctgaccaacatggcaaaaccccgtctctaacaaaaacacaaaaaaattagccaggtgtggtggcgcatgcctgtagtcccagctactcgggaggccgaagcaggagaatcacttaaaccagggaggtaaagattgcagtgagcccagatcgtgccactgcactccagcccgagtaacagagtgagaatccgtctcaaaataataaaataaataaaatatttgctacaataatacaaataagcagtgacaaggtgactccttggttgaatacataagaggaaattcctaccaggtcaagtggttctcagtcttggctatacactggaatcacctggggggcttcaaatagtgatacctgggtcctgctcccacagactctgatttaatcggtctggggtgcacccaagccctgggattttcagaagttccccagatgattctcctgtgcacctgaggctaagaaccacagcatgagacataacccatggacaggtgttgacaatattaggctctgattataaattagtttggccaggtaatttctttcttgatccaaataagcctacagaaattattcccaagaaagaaatcttagtattttttttttttttgacacaggatattgctctgtcgcccaggtggaattacattggcacaatcatagctcactgtaaccttgaacttctgggctccagcaatactcctgcctcaacctaccaagtagctgagactacaagcactcactaccacgcctggctaatttattttttttatttttattttttgttgtagaaacagggtctcaccatgttgcccaagctgggtggtctccaactcatgggctcaagcaatcctcccatcttggcctcccgaagtgctgggattacaggtatgagccaccacacccagccttccgagtaaatattacctattaattaggatttatcagacccaatacctaatttaacatgcaagtcacttgacacataatgagtgcttagaatatagagaaatcaaaagattatcaagtcagaatcatgcaaggaacttttacacaccttagcaacagcagattcacaccaagacctgttacactgattttttttttttttttccaggaaactgagccacaactttctaaaatcatgtttcttaggaaaaaatgtcactagagcctgatttggtcatattccaggagaattttatctttaataggtgtttcagaatgctatcaaggtggatgaaatgaaaacatttgtggccgggtgcggtggctcacgcctgtaatcccaacactttgggaggccgaggcaggtggatcacctgaggtcaggaggtcgagaccagcctggccaacatggtaaaaccccacctctactaaaaatacaaaaattagccaggtgtagtagtgcaggcctgtagttccagctactcaggaagctgatgcaagaaaatcgtttgaaccaaaggggaggaggttgcagtgagccaagatcatgccactgcacaccagcctgggtgacagagtaagactccatctcaaaaaaaatgtgtgtgtgtgtgtgtttgtgtgtgtgtgtgtgtagagaccaataagcaggctattttaagtaatccacagaaaaggcagagaggtagcagtgaagatacagacagctggtagattcaaaagatatttaacacacttgtaatgccagcccactgggaggccaaggcgggtggactgcttgagttccagagttcaagaccggcctgggcaatatggagaaaccctgtctctaccaaaaatacaaaaaattagccaggcatggtggcacacacctgtagtcccagctatttggggggtttaagtgggaggatcacttgagcccaggaagtcaaggctacagtgagccgagatcgcaccactgcactgcagcctgggtaacaaagcaaagccctgtctttaaaaaaaaaaaaaagagatatttaaaaggtaatatgggatatggtagttgggcacagtggctcatcccaacactttgggagaccaaggtgggaggatcacttttgtccaggagttcaagaccagcctgggaaacatagtaaaaccccatctctacaaataattcaaaaaattagccaggcttggtggtgtgtgccggttccagctacttgggaggctgaggtgaaaggatcactttaccccgggcagtcaaggctgcagtgagccaagattgtgccactgcactctaacctggcaacagtgcgacaccctgtctcaaaaatacaataataaaaataggctgggtgcagtggctcacacctataattccggcactttgggaagctgaggcaggtggatcacctgaggtcagtagttcgagaccagcctagccaacatggcgaaaccccatctctactaaaaatacaaaaattagccaggcatggtggtgggcacctattatcccagctactcaggaggctgaggcaggaggatggcttgaaccctgagggcggaggttgcagtgagccaagatcgtcccattgcactcctgcctaggcgaaagagcgaaactctgtctcaaaataaataaataaattaaataaattaaataaaaggttatgtggtttggatctgtgtccctgccaaatctcatgttgaaatgtaaccctcagtgttggaagtggggcctggtggcaggtgtttggatcatgggggtggatccctcatgatggcttagcaccatctccttggcgatgagtgagctcacacaagatctggttgtttaaaagtgtgtgacatctcacctcccatcgtttttgctcctgctttcaccatgtgacatgcctgctcccacttcagcttctgccaagagtaaaaggtccctgaggcctccccagatgctggtgccatgcttgtactgtctgtagagtcatgagccaatgaaacctcttttcttttttttttttttttttaagactaagtttcactcttgttgcccaggctgcagtgcaatggcacaatctcggctcactgcaacctctgcctcccaggttcaagtgattctcctgcctcagcctcccaagtagctgggattacagatgcctgccaccacacccggctaatttttgtatatttagtagagacggggtttcgccatgttgaccaggctggtcttgaacttctgacttcaggtgatccacccgcctcagcctcccgaagtgctgggattacaggcgtgagccaccgcacctggccgaaacctcttttctttataaattacccagcctcaggtatttctttatagcaacacaagaatggcctaacacaagaggcaaaatcagcttagtgatacatgtggaacaatgaaattaatctgtaatcagtcctttgacatttcaggacataacactacactattttatcattagtaatcaagcactgcaataagtatggaagaccaaagggtccacttcccgctgagtttcctggaagtgtcttcccatgaaactgttggggacatgactcacttatagagcaagctgggggccctcaaagtagaccggaatccttgtggggtctgctccacctcgtaggcatcacagggctcatcagcacactccatggagcctgcacagaaaccatcacatctcactcagaaacaatgttgctctgtggacaacagctttcgcctcagctgtcaaccgctgttgaggtttaaaaaaagcaatacacaggcataaagaacagccggacactgtacattccatgacactgctctgatactccttctgacccgatcgtataggaaataaaccttaaaaaaacacataatgactattttaaatctttcagtcttggaaccctgggaaggtagcatatgcatacggtagttccccccatctgtggtttcgctttccaaggtttcaattacttgcagttaactgctgtccaaaactattactacaataagatactggatatgagacagagagaccacattcacatcacttttattacaatgtattgttataattgttctattttgttagttattgttattaatctcttactgtgcctgattaataaactaaactttatcaaaggtttctatatacagttggccctccatatccagggattctccatctgtggattcaaccaactgcagattgaaaatatttgaaaaaaaaatccagcctgggcaacaaagtaaaaccccctcatctctacaaagattagctgggcatgatggtacatgcctgtaagtccccactactcaggaagatgatgtgggagaatcatttgagcccgggaggtgaggctgcagtgaaccaaggtcgtgccactgcactccagaatgcgcttgtctcttaaaaaaaaaattacggctgggcacggtgactcatgcctgtaatcccagcatcctggctatcacagtgaaaccccgtctctactaaaaatataaaaaattagccaggcatggtggtgtgcacctgtagtcccagctactcaggaggctgaggctggagaatggcgtgaatccgggaggcagagcttgcagtgagccgagatcgcgccactgcactccagcctgggtgacaaagcaagactccgcctcaaaaaaaaaaattacttggaaaaaagtcagtaaaataacaatacagcaataaaaataataaaaattaaacaacaatacaggccggtcatggtggctcatgcctgtaatctcagcactttgggaggccaaggcaagaggatcacccgaagtcaggagtttgaggccaccctggccaacatggtgaaacactatctcaactaaaaatacaaaaattagccaggtgtggtggcaggcacctgtagtcccagctactggggaagctgaggcaggagaattgcttgaacccaggaggtagaggctgcagagagcccaaatcactatctcaactaaaaatacaaaaattagccaggtgtggtggcaggcacctgtagttccagctactggggaagatgaggcaggagaattgcttgaacccgggaggtagaggttgcagagagcccagatcacgccactgcactccagcctgggtgacaagagcaaaactctgtctcaaaaattaataataataaataaaaaataaaaaacaatacagtaccacaactatttacagagcatttgcattgtattaggtattatatgtatcataagacaggatttaaagtaggatgtgtgtagattacatgcaaaaaccacgatgttctacaaaagggacatgaccatctgaggattttggtaacattattgggcaatggactaaatacatacgttcatttatttcaaaaatttatacataattactttagggccaagtgcggtagctcatgcctgtaatcccagcactttgagaggccaaggcaggtggatcacttgaggtcaggagtttgagactagcctggccaacatggtgaaaccctgtctctactaaaaatacaaaaattagctgggcatcctggcacatggctgtaatcccagctactcaggaggctgaggcaccagaatcacttgaacctgggaggcggaggctgcagtgagtggagatcacattactgcattccagcctaggtgacagagcaagactccatctcaaataataataatattattaataataataattacaactctacaacggaacttaattttgtcatagaatattaatggttaatattaacaactaaaatttctctatgatatttaaacctctgtacaaagaagaaacataacttataaattgcaaccaaaaacacttcagctaaactcaaactcatcagtacccttagacatgaacataaatggagctatatgaggccaaacatctcaaatttcagtgctgacacagaaacacattaaaacaaacaaaaaattgatcctacaatacacaggacattttacttcttatctgaccaaagagcaactaggattaccttgatagaagtcctcttcatcttcttcatgttgataggtctgttcttggactggattcttcctgtaattccggccatcaattcttataagctgtggacgcagaacttccatgacactttctccaaatgatattccaattatgccctgaaaaatataattaccatcttacctttcttagtgagaattaaaactcctatctctagtgtctgaaccattatgcaggtctgaattgggcatcagttcacagtatctcccacacaaaagcagcaccatttcccattggatttcccatctgtaaaccagtttaggttaattgctgcattttctaccacactggctcactctagacagcaaagtaatttgtaaactatttatcaccccccccccaaaaatgattaaaaggcatacactcttaaaaaaaaaaaaaaaagaaggaagggaggggagcagtggttcacatctgtaatcccagcactttgggaggccaaggtgggaggattggttgaggctggagttcaagatcagccttatgaacatagtgagacctcgtctctaaaaaaagaaaaagagggccaggtgtggtggctcacacctgtaatcccagcactttgggaggccgaggcaggcagatcacaaggtcaggagttcaagaccagcctgaccaacatagtgaaaccccatctctactaaaaatacaaaaattagctaggcatggtggcacgtgcctgtaatcccagctactcgggaggctgaggcaggagaatctcttgaacccaggaggcggaagttgcagtgagctaagatcgcgccactgcactccagcctgggcaacagagcacaactccgtcttaaaaaaagaaaaagaaaaagagaaagagaaaagggccaggcatggtggcttacacctgtactcccagcactttgggaggttgaggaaggaggactgcttgagcccaagagtttgaaaccagcctgggcaacatggcgaaaccctgtctctcaaaaaacaacaacaacaacaaaaaaaagagagattaaaaataaaaggcattataaatgcccgtatataaacacagcctgtccatggctttgaaagagagaataaaggtctctttattactttaacctaatgagtaaaatgcaaacttcagtggttatctaaccatttgcacaatatctctttttttttttttttttttttttttgagacggtgtattgctcttgttgcccaggctggagtgcaatgacacaatctcagctcactgcaacctctgcctcccgggtttaagcgattctcctgcctcagccttcccagttgctggaattacaggcccctgccaccacccccggctaattttttgtatttttagtagagatggggtttcgtcatgttggccaggctggtctggaactcctggcctcaggtgatccacccgcctcagtctcccaaagtgctgggattacaggcgtgagccactgcgcccagcaaactctttctatctagcaagataattaagacaatgagggatatttaatacacttaaccatccagaaaaaaaaaagcccctaagtacttttagaggtgctagaaattcataccaaacaatcagttccagttgtctgttaaagcacagttaaaataacaacttaaccaatatggttctcagaccaacatactgctgaaggggggaatccaatttccacaggccactgcccaacaaaatgcacatcgctcactgcgaagccaagcttctggtcacatcacttaatgaatcaataatttaggaaacaaaggttccttacaggctagctgaggttaaattcaaccaatattcctaccacgtacagcttagatagtcttgaagcccaaaatacttaaaagttccaaagaaaacaagttgatccttactaaatacactaatgttcaagccaacgtgggcgcggtggctcacgtctgtaatcccagcactttaggaggccgaggcggatcatctgaggccaggagttcgagaccagccaggccaacatgatgaaaccccgtctctactgaaaatacagaaagtagccgggtgtggtggcgggcgcctgtagtcccaactactgggaaagctgaggcacgagaatggcttaagcctgagaggcggaggttgcagtgagctgagatcgcgccactgcactccagcctgggcgacagagcgagacttcgtctcaaaaaaataaataaaataataattgatgagttgtgcgcttacagaaccaagaagaggtttcgtgagaaataacaacacagaaggtaaaccgacatggatggaggaaaagggcacatcattagcaatactcgatgacatcacaacccagtggcctattccccgaggcctctaaagttctcaacgaaaaaagactttcaaaggaaaagcttaaaaaaaaaatgttccccacaaaaacagactaagatgaaagtcgggccctcagaccacgagctccggaagaacaggcagttgtcgcggagacagcaaatgcagcatctacctgtcctacatggccctgcgctacgagactgctcggaaggaaagagaggaataaccaacttaaccctgcttcgaggtggtttggagaggaagaggaaagctgtgtctttctgcaatatcgtgagggaagccgaggccctgaatcatcaaagagaaggagaagaggactaggcggctgcaggtaaaccaaggtagggcgaggaggaggacccggaattcctctacgcgagcgcgttctctgctcccctcctcgcgtctccgccccggccacgcccaccacggcacgggcgcgcgcacgccgccttcgccgctggctccgtctgttggggggcgaacacgccgcggtcctcgtcgtggtgagcgcagccactcaggctggtcctgggggtggggctgtaggggaaagtgctaaagccgctgaggtaagaggccgaggggtcgagggccctcgggagcttggtgaaaagggagttaacccccaggatcctacctgcagggactagaaaaatggagaaggtaggaggagaaacaggagactgctgcagcagacgtgcgataggaaatttccccaggccgggtttgaccgagtgcgcatgcgggccgagggctggcgcctgcgcagtgggacagcgccgatggcgtagtttcctggggacccagctgggtgggaaaagtggctaggagttagcttgggagccgctggtgttctgagcgctcccctctctggccactttttctccacgcccacccccgccccgttcccgcccccccccccccccgttacagctgcggcatctatttggtttgggttgtaatccagctgttttgaagtggaacgatttgttgatgatggaatttaatgattacttgtaataatttgcctttgtactagggtaggaacttttaaggaattactctttttaagaaaataggcatatatctgttagaaaggaaaggaatttatattcataaatatatgaatgcgaggtcatccctgccgtacatgaagtaaatgtttaagcatcttagctcggacacagcaatctgtgtccacaaagcatcgttactctcctgtgaggatctccactgtcagccccaacttacctgacagggccaagtcccaggatacttcatcatcagtatttgtttgacaaaattttactgggcacctccggtgggcctggcaaactggttgaagatagagttgtgcgaatagatctgcacaatgagaaagaaaaaaatccataatgatccaatactcatgacacagcgcttctctatctcctgcatgacctttgctgagctgctcgccctgcgttctgtcgtttgttcatcattcattcatccgaaatgctcgggactggaagcacagtggaaacactgccccaggttctgtgctcggcattgagggtagaaagacttttcgaaggtggcagggtgtttcttaagatcattgaaccttaaaatgaaagtgtaggccgggcgcggtggctcacgtctgtaatcctagcactttgggaggccgaggcgggcggatcacgaggtcaggagatcgagaccatcctggctaacacggtgaaaccccgtctctcctaaaaaatacaaaaaattagccgggtgtggtggcgggcgcctgtagtcccagctactcgggaggctgaggcgggagaatggcgtgaacccaggaggcagagcttgcagtgagccgagatcgcgccactgcacttcagcctgggtgacagcgagaatccgtctcaaaaaaaaaaaaaaaaggaaagtgtaaagtgcttaatagaaggcactggccctcctcctgaacagattctttctcctgtgggagcttgctgactctgttagatggagagaattaatacttttcccatgaggttttttcatagtaagtatgaaaacctgggatctgcataggaaaaaagactcagtagtaactctccgttaatgactttgaatagccaagatttatgaagtgtttactaagcctgtaactgttccaagtgttttacgtgtattaactaatctttgtcacacctgtgtgaggtaggtgccgttattacaggttgagtatccttaatccagaaatccaaaatcctccaaaatttaaaactttttgagcactgacaggatggtcaaaggaaatgctaattggagcattttgaattttagattttcggatttgagaggcttaatcattaagtataatgcaaatatcccaaaacctgaaaaaaaaatccgaaatccagaatacttccaagtcccaagcatttcggatgaagggtactcaacctgtttcccattttgcagataagacaactaaggaacaaaaagatcccggagggggaggcggaggttgcagtgagccaagatcgtgccattgcactctagcctgggcaacaagagtgaaactctgtctcaaaaaaaaaaaaaaaaaaaaatatatatatatatatatatatatatatatatatatatatatatatatatatatgccggaggttgcaattttttacatttttggcatcagaccttggcgatgaccttgagcagtagggtataaataactcccacatgcttagcgttccagtaatggaacactaggcataaatgggttaaatgatgtgtccacagtcatgcagcaagtaagtagcaaaaccagaactcagagaggcttcataatcttacccattatgctgctttacgttgcacatgacaaataacataccaacaagccattgcttcaaaatgtcacagcagataagctaaaattgtctctacacctcagttttattttttcatatataaaatggggaagttgggttagatgacctttaaggaatctgtggtttctgtgaaatatttaattcactcagcaaacatttactgaagtgaacaactacttccttactataggccaggtgttatgtttggttctggtgatcagttaattcctgccctgagagcagttaccatctagggtttattagttttgctttactctcatttaccacttgctggtagcattcaaaatttaacctaaatctttagagctagaaattacttaggtatatccttccacctcagcagaaaactgcttatttaaagttagctttatgctaattctgtgctccagttttcaaccctggctgttttgtgtgtggaacgatagtagttctgagagtttggaagaaaacaggatgaaagggagttcgtttgattatattcagcttagaagtcacactgtggctaccttttgaagctgtcctcactctggcagttgcttgggtgctctgctcagcacctgacttcaaaatataaagtataaagcatttgcaactgaatagagcatttatcagggtgtaggtaaaatagattagagttttaaatcttaggtgagatatataaacagttcaccgtgggttctactctgaactgatgggaaataaagactgagctgctctccaaaagatggctaagttgtctgtatactttatttgaatcccaccaggaattcacttagagatttggacctggtcccttactgcttaagttcaaaaacaattcaaaaacttgtcaggctgtattttgacccagtgtagtccggaagattggatattaatctaactcccaaagttgttgcctctgtggatatgagtacaatttggaaagttatcagagctcagagaaaagaggaagagtgatctaataacaagattgaaaatgtcagctgagcagagtggctcaggcctgtaatcccagcattttgggaggctgaggtgggaggatcacttgagcccaggaattggagacccgcctgagcaacatagtgagacttcctctctacaaaaaataaacaaaattagtggggtgttctggcacgtgcctgtagtcccaactactcgggagactgaggtgagaggataacttgtacccaggaggtcaaggctggagttagccaggatagtgccactgcattccagcctgggaaacatagcgacactctgtctccaaacaaaataaaaaataaaatgtcattaatcaatttgcatttttgctgacagtctagttataatagctgttttaccgttcccataccccacttcactattaatcagtgttacttatagacatgtaatgaaatcagaaaccaagctctgcttctctaacagccttaaatcttcatcacaaaattaagcaaacagaacagccagtatttcaagacatactatatcattttccttactaggaatctggattttatgtatataaatttatatttgtatttcatttcctcacttttttctgttttcaaaaaacatggccaggtgcagtggctcacgcctgtaatcccagcactttgggaggccaaggcaggtggatcacctgaggtcgggagttcaagaccagcctgaccaacatggagaaaccccatctctactagaaatacaaaattagccaggcatggtggtgcatgcctgtaatcccagctactcgggaggctgaagcaggagaatcgcttaaatccgggaggcagaggttgctgtgagccgagatcgcgccatttccagcctgggcaacaagagggaaactccgtctcaaaaaaaaaaaaaaaaaagaagagaaaagaaaacataagtttcagccaggcatggtgggtcacacctgtaatcccaacactttgggaggccagggtgggagaactgcttgagcccaggagttcataccagtctaggggcaacatggtgagaagttgtctctactaaaagtaaaaagaattagctgggcatggtggcatgcacctgaggtcaggtcccagcgacttgggaggttgagaggttggaggattgcttgagcccaggagatgaggctgcaatagcatgatcacgccgctgcacttcagcctgggtgacagagcgagagcctgcctcaaaaaacaaatatgtttcaacttttttataataaatatgttcattttgcaactagcaaaaaaaaaaaaaaaaaaaacccgaaagaaaaatactcaggctggtctaggtgaagtggtgtttacagtaactgatcaccaccagttacagatttctttgttccttttccactcccactgcttcacgtgactggccagaaaaaaaaaaaaaaactcagctaaaattctctctgaccattatagagggaaattcattttacaatccttttttctcccccgccaagatggagtttcgctcttgttgcccaagctggagtgcaatggcgctatctcggctcactgcaacctccacctcccgagttcaagctattctcctgcctcagccttccaagtagctgggattacaggcgcctgccaccacgcccagctcatttttgtattttaatagagatggagtttcgccatgtttaccaggctagtcttgaactcctgacctcaggtgatctgcccaccttggcctcccaaagtgctggcattacaggcgttagccaccagcctgcaatcctttttgaagtcctttcttttaattgggctaaaattcacataacataaaattaaccatttgccattttaaagtatacaattcaatataaagttatttttaatctaaatactagaaatttatccattacaacagccaatagccacatgtggctacttaaattttaattaatattaaataaaatttaaaatacagttcttcagtcacaccagtttataggtgcaacatgaagctactggcaaccatattgtgcagtgcagaaatagaacactggaacatttccatcatggcagaaagttctattagcatggcactagaccattttttcttttctttttttttttttttttttttttgagacagagtctggctctgtcacccagactggagtgcaatggaatgatctcagctcactgcaacctccgcctcccaggttcaggttcaagtgattctcctgcctcagtctcctgagtagctgagactacaggcgcccaccaccacacccagctaaatttttttttttttttttttttgagacagagtctcactcttttgcccaggctggagtgcaatggtgcagtcttggcttactgcaaccactgcctcccaggttcaagcgattctcctgcctcagcctctcaagtagctgggattacaggcacgcaccaccatgcccagctaatttttgtatttttagtagagattgggtttcaccatgttggccaggctggtcttgaactcctgacctcgtgatccacccgcctcggcctcccaaagtgctgggattacaggtgtgagccaccgcacccggccattttttctttaaaaaatactaaatacacttgttagagggctgagcgcagtgagactttgggagaccacggtgggagaatcacttgagaccaggagttaaagaccagactggccgggcatgatggctcatgcctgtaatcccagcactttgggaggccgaggcaggcagatcacgaggtcaagagatggagaccatcctggccaacatggcgaaaccctgtctcaactaaaaatacaaaaattagctgggcgtggtggcacgcgcctgtagtcccagctactcaggaggttgaggcaggagaatcgcttgaacctgggaggcagaggttgcagtgagcagagatcgcgccactgcactccagcctgccaacagagcgagactccgtaaataaatacatacatacataccagactgagcaacatagcaagaccttgtctctatttaaaaaaaaaaaaaaaaggaaagaggccaggcgcagtggctcatgcctgtaatcccagcactttgggaggccaaggcaggcaaatcacctgaggtcaggagtttgagaccagcatggccaacgtggtgaaaccccgtgcctactaaaaatacaaaaattagctgggcatggtggctcatgcctgtaattccagctactcaggaggctgagacaggagaatcgcttgaacctaggagacggaggttgcggtgagccgatatcatgccactgcactctagcgtgggcgacaagagcgagactccgtctcaaaaaattaaaaaaggaaagaaagaaaataccatatacactttttagaatttttgttaaagtcgtgtaagcttctgtggcaaagggagggttttgttttgaacttttgtaaggtgtcatgtattcagtacagttttctcgttaacatttgcattttttggtatgaaataggattaaacactcacaggtaggtgctctgttcataataggccatggtttccaagattgtttcctgaactttttgttccagttttgggatgccaccaagtgataagtttgggtattacatttagatgaaaaggttaatttttttttttttttttttttttttttgagagtcccgctctgtcgcccaggctcactgcaacctccgcctcccgggttcaaatgattctcttgcctcagcctcctgagtagctgggatgagaggcgtccaccaccacgccctgctaaatttttttgtatttttagtagagacagagtttcgccatgttggccaggctggtcttgaactcctggcctcaggtgacctatccgtctcggcctcccaaagtgctggaattacaggcgtgagccaccgtgcctggccaaaaggttaatttttaatgagaaagccaatatgtatttcctaactagttccccttccctgggaacagaacacagtgttattctggaatgttatttggaaaatattataatttattgttgtggcttgatcaggatgtatccaagaaaaactgtcctatgaagtgtgatgcttttatcctcgtataacttatttcctctgtcaaatttctgccttggcactgccatatcaccccttcataactcataaatcacccacagtcaatcttagttgacataaacagttcgctaatggtaggaattcatgttttaagtagatatactattcttaagcatattttcagttcaaaacctgactgatattttggcctgagacatcaataaaatattgtgaaagtagagagcatagaaaaaaggggagctaactctttacaaaactgtatgctggcccttacagcagctagaatgaaatgttgtcactctcacttccataaacttgccaattgctgtttttctttctctgtagtgaagtaagaactctgctagagaggaaatggctgcttcatcatcatcctcctcagctggtggggtcagtggaagttctgtcactggatctggtttcagtgtctcagaccttgccccaccacggaaagcccttttcacctaccccaaaggagctggagagatgttagaaggtgatctcatgctgctttctgaataattggattcagatctgcaatgcatattaattgtaaagaagctattaagtggattaaagatgagtttgccctgatttcagctccacatttcatttcttgtccccatctcaaaatagtatctttaaaaacaagtcttgctccagaatcagaattttggagctgaaaaggactttggaaatcaatgaagtcatctagagttatttagatccagaaaagttaagtgatttgaccaggttaaaggcagagtcagggctgggcacggtggctcactcctgttatcccagcactttgggagactgaggcaggtggatcacttgaggccaagagtttgagagcagcctggccaacatggtgaaaccccatttctactaaaaatacaaaaattagccgggcatggtggtaggcgcctgtaatcccggctactggggaggctgaggcaggagaatcacttgaacctgggaggtagaagttgccatgtgccgagatctcgccactgcactccagcctgggtgacagaatgagactctgtctcaaaaaaaaaaaaaaacgcagaggcagcactgaatccaggaattctcttgacctcctactccagtttgctttatcctggcacctgtctacctcccatggtagtaggtttgatgtatttttttctagggtgattaatctacggatagattcaccctgtcagaaaggttctaagagggaataaaagctaatacattgcccttttgtgtgaacatgactcctgacccactgcagcatgatgccgtgtggttcttatagcaccaaagccagatttgcatcaaatcattcaccatcttgttcagcatcattggctgactggctggccaagatcagggtacaggctgtaagcatgtcatttgaagagcaaagaggttacttaaaatgcacatttctggccaggcactgtagctcatgcctgtaattctagcactttgggaggccaaggcgggtggatcacctgaggtcaggagttcgagaccagcctgcccaacatggtgaaaccccatctctactaaaaatacaaaaactagctgggcatggtggcgatgtctgtaatcccagctaatcgggaggctgaggcaggagaatcacttgaacccagaaggcagaggttttagtgagccaatattgtgccactgcactccagcctgggtgacagagcaagactctgtctcaaaaatatatataaataaataaataaaatgcatatttctgggcccaccttagagtttctgaattagtctagggtgtagctcaggagtccattttttaccagcatccaggcccttctcatgaaggcagtcttccatattttgaaaaacattgggaccaggagtggtggctcaaacctaaaatttcagcattttgggaagccaaggcatgaggattgtttgagcccaggagttcaaggttgcattgagccatgatcatgccatggcactccagcctgggtgacagaatgagactctgtctcaaaaaatagtaataataaatttttaaaaagcactgggaggccaggcgcagtaactcacgcctgtaatcccagcacttctggaggccaaggcaggcagatcacaaggtcaggagattgagaccatcttggctaacatggtgaaaccccgtctctactaaaaatacaaaaaaattagctggatgtggtggcgcatgcctgtagtccagctactcaggaggctgaggcaggagaatcacttgaatctgggaggcagaggttgcggtgagcagatatcatgccactgtactccaggctggtgacagagcaagactctgtctcaaaaaaaaaaagcaaaaaaaaagctttggggaataacctattaaggattcaaaatttacttgattctagtattttagtgcttaattatatattgatcttttttcctttaagtgttgcaatttttttttttttttgagacagagtctcgctctgttgcccaggctgtagtgcagtggctcgatcttggctcactacaacctctgcctcccgggttcaagtgattctcctgccccagcctcccaagcagctgggattacaggtgcccaccaccacacctggctaatttttttaatatttttaatagaggcagggtttcgccatgttgcccaggctgagcttgaactcctgacctcaaatgatctgcccacctcagcctcccaaagtgctatgattacaggcatgaaccaccgcacctggccttaatatttcaaatttacacaactatattttaaaactaatctaggaatatctgtgagaaagatacaaactataggccaggcatagtgactcacacctgtaatcccagcactttgggaggctgaggcaggcagattgcttgaacccaggagtttgagaccagcctgggcaacatgacgaaatcctgtctctagaaaaaatagaaaattagctgggtgtggtggcacgtggctgtagtcccagctacttaggaaggtgaggtgggaggttcacctgagcctgggaggtggaggctgcagtgagctgtgatcgcatcactgcattcgagcctgggtgatggagaccttgtctcaaaaaaaaaaaaagaaaagaaaagatacaaactatagttggccttgggggtgatgaataatcagaaataataaaaagagttacgggttaagcccaaaatcatttgtgacaggaaaccacggggggactctgggaccatagagctccctaggattggtttgggttatgactagtggtgaggtagatgaccaggtagcatatgtaattagtgatacatgtacttctctctttgcctttttattttctttaattgtgttaactaaatactcaagttagtatcactgagtctggttagaagtagtgaacaattggggccctgttaccatatttggtgctaaaactatattatgacttcatttatatgcagcaaagacctagtattaaggaagtttcccacaaaacaaatcaaaaatgggagacacttaaattgcttaatgagttttatagcagcagaagaatccatattcaacaatggagctctaagattaaagtcatttaaattctagctataagaggaatttaatacaggaggtacctccacagtctcaaagctatcagcattctttgtcagtatacatcaaattatgtggagatattgaagaagaaaggcttctgagattagtctgaatgttgatgttctaacgagttatagatctatccatttttattccatctcaatatgcttcatggagaaatgtgttgtgtttctgttgtaggatacatttatattaagtataaatacacagtgcacagttttgattgtgtttcttacatttcaagttttaccaataatcttaaatcttaaaaagattaagataatctttaaaaatctaaaatcttaagaatataaagagtattacacttaaagactgaaaaataatgtagagatggcaacccctaaacccatttaatattcttggtcaaatcaagaatattaaattgagaagagtactctgaaatgtaaggatgttggatttggaagcattttctaccatgtttataggtgatactattctattatacaataaatctaacacacatgtacctgaccaataatagtttaatagaatatgaaaatagaggccgggcacggtgcctcacgcctgtaatcccagcactttgggaggccgaggtgggcggatcacctgaggtcaggagttcgagaccagcctgaccaatatggtgaaaccccacctctactaaaaatacaaaaaaaaaaaaaaaaaggcatcgtggtgtgtgcctatagtcccagctactcaggaggctgagagaattgcttgaacccaggaggcggaggttgcagtgagccgagatcatgccactgccccccagcctgggcgacagagcgagacttggtttaaaaaaaaaaaaaaaggatatgaaaatagagcaggaagggttgcctgtcaagagtaaggaacaaaagcagttaggaatcaaggatggatgctgtttttaatctcaaaaggttcaacttgatgttacatccttgtgagtctaggatagtaaacccaaatcacctgtagttaaccttgtgaattaacttttttgtgcctctgctctctgataacagacacctcacataagcagcatacagcagtttgcagcattctcctgcccttggccaaaattgtcctcacccagttattactgagcacattagaaactgccttccagcccatcagtggctgtattttagagacattgtagccactgaagtataaattatctggcattgtctaattgcctactgtgaggtaatattctttttaatgtatttgttaccatccttatttattggagttggctatggtgttagatttgggtaatttactaaacttttccctgtttatgacctgtgcttgtccctgacaaggaaagctgatgtattgctacctgctgtgttacaaagggtttgattacagtttctaaatggaagagattgcccccagctgactccgttctggagcaattccaggctttagactggtactgataccacatctaataggatgtggctaagaagcaattggacttggacgttaatagggagctgcaaatcagcaaaagtgtgttccacaggcatatagtgtggtggagtgaaatgcagaggttcctttttgaaagtttagcttatatccttttgctttgaagttcattaccaaggaaaatatgcaaatatcacaacttaactattttatcctaatggtgcctgtgattaaatgcaagtgagaggtggcactttcaggagcttccatatacatcttggcctgatccttatagcctataattcccactgccttgtgtgtaatcctaaagttcaggatcaaaccatctgggaggtaaactctaattgtctatgctttcctctttctaaaataaaatatgagttataattggactttttaagcaagaatatgaataggataatgactgctgacattcaaaccccttttttttttgagactgagtttgaatttacagaatgtaacactgtctctgaagaatacaaaaagtatacatcccaataattatactttcatttttttctttttctcttttttttttttttttgatcactttgaagatgatattggaaggatgccctcttggttatatattcaagctctttggatacagtatctatagttgtttttttttttaattggttattgtgacttctgaaataaggtttcctttgtgtgaaactcagcatgaggccagaatgtgttagtcctgtctgcttgccatgtaatacctggccaacacaacaacccatgattgatgggtgaatgcttgaggcctagtagtgctaacgtgaagtactgcctgaaaaaggacagctgtgtcctctctccccgtttgttttaggattttcgcaataaggtacatcccccaaatggtttctgctacctttttaaaaatcaaatgtttctacgtgagctgtaaatttttgagaatatgttttgctgtatcagcccttgcctgacaaggaataacatgaactagcttatgtttcatgatcatcttccaagtgctgtggcaactgagttggccacttcttgttggcagttcttggcaccagtacaattctaggttctgaacttgcaccatactcttatcgtcatccaaattgcagtgttttggttcagttggaaaatcaaggttacagtttgcgttcacagaatgaaatttcccagcagtgttctgtgattgtcagagtgatgtaatttgatatattaaaaatcaacaattttttcctcagctttgttttttagactgaaaatgatttggagttttggtgaacctttatattttgacactacaggagccagccacaaggccaaatgtgtcagctgccagtgtttgcttgacatacaggagaacattaaggaactctcaggttgggaggagggaagtgttgaccaggacatcagacggaggtttcttgtttttgtttttttaaacactatttttaaactcttaagtagagggactattttaatattctaggtatagaataaatagcttttataacagtcttagttctaaatgaagcagaacccgtctttgtaaacactgagaactagaccctgaatgtacaagcagggaaaagaatagacaagtttacttggtttatcagaagccataaaacctttagagcagattaaaaccttttctccttttgtttgtagatggctctgagagattcctctgcgaatctgtttttagctatcaagtggcatccacgcttaaacaggtgaaacatggtaagcacatgagtgttgcgtacttgactgtgagaataaatttgctagggggtggatgaggctgtgacaaaaatccccaaactcagcaaggctattttagtggacttcctaaattaaagaacattctaggtcttaatctagtcataatgtccacattgaggcttaaggttggggccgagtgcagtggctcacgtttgtaatcccagcactttgggaggctgaggcgggtggatcacttgaggtcaggagtttgagaccagcctggccaacatggtgaaactgcatctctacaaagaaaaaattagtcaggcatggtggcgcatacctgtagtcccagctacttgggaggctgaggtgggaagatcacttgagcccgggaggttgaggctgcaatgagccggaatcacagcactgcactctagcctgtgcaacagagaccctgtctgaaaaacaaaaaaagttggtcctccagggagtcagtgcttcctgctcctcttgtgttactttttcctctcctgtctgaaacctccttttactgttgtcctccactggttaccatcatcatcttcaagtatttgtacgatacctcctggtctgtctatactctaacatcctgataacactttttctgttacattaggcctcaccaggccttcatttctgcatcaacaaactgtgttccccctccagaccatttctccattgaaactttatgtagggggaaaagctgtaattgcctctaaccctaggattttagtccacaaatcactatggcatagaggatgagtactttttttaggaacagagcacatccaggccgggtgcagtagctcatgcctctaatcccagcacgttgggaggctgaagcaggaagactgcttgagcccaggagttcaagactgacctgggcaacatggtgaaaccccatatctaaaaaaagaaaatacaaaaattagtggagaatggtggtgcatgcctgtggtcccagctacgtgggaggctgagttgggacgatcgcttcagcccaggaggcatactccagccttggtgacagagtgagaccctgtctctggaaaaaaatagggcacatcctgaaaatgtgatcattttattttaaaatgacttttattttttgagacggagtctctcactgtcacccgggctggagtgcaatggcatgatcgcggctcactgcaacctttgcctcctgggttcaagtgattctccttcctcagcctcacaaatagctgggactacaggtgcacgccaccacgcccagctaatttttgtatttttagtagagatggggtttcaccatgttggccaggatggtcttgatctcttgaccttgtgatccgcctgccttggcatcccaaagtgcttggattacaggcatgagccactgcgcccagcctttcttcttttaacattagaagaaacttccaacttaaaaaaaaaaaaataggccgggcacggtggctcatgcctataatcccaacaatttgggaggctgacacgggcggatcacctgaggtcgggagttcgagactggcctgaccaacatggagaaaccccatctctactaaaaatacaaaattagccaggcatggtggcatatgcctgtaattccagctactcgggaggctgaggcagcagaatcgcttggacccaggagacagaggttgcagtgagctgagatcacaccattgcactccagcctgggcaataagggtgaaactctgtctcaaaaaaaaaaaaaaaaaaaaaaaaaaattaagcttctgaccagcatagaataagaccccattatgagaattttgagggtcgggcacagtggctcacgtctgtaatcccagcactttgggaggctgaggcaggcagatcacctgaggtcaggagttcgagactagcctggccaacatggtgaaaccccatctctacaaaaataaaaaacttagctgggcacgatggcgggtgcctgtagtcccagctactcaggaggctgaggcgggagaatcacttgaacccacgaggcagaggtttcagtgagccgagatcgcgccattgcactgcagcctgggcaacaaagcaagactccattccccacccccaccccaccccccaaaaaaagagagagaatcttgaggagaaaaaaaaatccatctagaaattttttttttttgagacggattctcactctgtcaccaggctggaatgcagtggcacgatctcggctcactgcaacctctgcctccagggttcaagcgattctcctgcctcagcctcccgagtagctgggactacaggcgcatgccaccacgtccagctaattttttttgtatttttatagagatggggtttcaccatattggccaggatggtctcgatctcttgacctcgtgatccgcccgcctcggcctcccaaagtgctgggattataggcgtgatccaccacacccggcctagaaattatttttataccagtcatcatcttggtggctggtggcagtctcttgggtaatacgttgttgcataatattctttccttgactccttacagatcagcaagttgctcggatggaaaaactagctggtttggtagaagagctggaggctgacgagtggcggtttaagcccatcgagcagctgctgggattcaccccctcttcaggttgatactgcctggatggtcacctctggtgcgcagcaagtgcaaagccagtgggggactttctcacagcttacatagccatccagagatccacagctacgtcactgaattgttaatgcacatttgtacttggtttctctgtatctattcacaggcaacaaatacttatatgtgtgatctttcagggaatgttttgtttatttgtttttaaaagtattgggaatcagattaagacaatcagtttcagagaaccaggaggtttggggttaagagatactcaaaaattttcacaagccaagtagggcatatatcagatttggccaactgaatggcgtctgtcctgtcatccatatggtgcctggaaatatttaccagtcaaggtcaaggtcagcatctgtggttaaaaatatagcattctgacctaaaaaagttattttgcagatgaatgtgttttcaactcaggacctatccaaatgaggaatttttaaatattcttttttttttcctatttttagacatcaattctatagattctgactttttctaacctcttatagacatgccaaatgctggcaaaaagaagtgctttttggatatggcagcacttgtaaaaataaagcagtaagcaaaatccttttaaacacagaaatcctgagttcttctcattggtggactcaagcaattctgtagcaaataaatcctttgaaagagctccaaattggtggcattatcctttcaaaatctcagggatttgggatgaagtgaagaggtcaaattactttttagaagaagggaatctaaaaaccatctctcctaaacaaatggtagactggctttacttaagggatatttgtctttataggagtacataaatttatcttaatgatatttaagtagtttttttttttttttgagacgaagttttgctcttgttgcccaggctgtatcgcaatggcgcgatctctgctcactgcaacatccacctcccaggttcaagcaattctcctgcctcagcctcccaagtagctgggattacaggcacccgccaccacacccagctaattttttgtatatttagtagagacggggtttcaccatgttgaccaggctagtctcgaacttctgacctcaggtgatccacctgcctcagcctcccaaattgctgggattacaggcgtgagccaccttgcccagccaatttttttttaaagagacatggtcttgctatgttgcccaggttggtcttgaactcctggcctcaagagatccccccaaccttggcctccaaagtgctgggattacaggcatgagccaccgcgcctggcctcaagtaagtttttataccatgataggggaaaacctggaaggctaagagatgtgctgttttccttcatgggaccccactttccacagtaaacaactggtataatcatttattacgttgtatgcaaattttgccttagacaacatttgtctggttccttattaataacttgcatctgatctgcttagagttgcttaattataagtaaatataatcccagtagcatttagccttaatctcaagagttcaaaatgtttaacacattctacctgacgggaggtggtgacctcattcagtcggttaagagcctgagccctgtgaagttaaacacctgctcatggtcacatagcccaggcagaagaaaatctcggacttggaatagatcccagttgcctgataattcatctcattattgcctctaaagcaaattggagactgggcacagtggctcccacctttaatcccagcacctggggaggctgaggtgagtggatcactagaggtcaggagttcaagaccagtctggccgacatggtgaaactcagtctctattgaaaatacaaaaattagctcagtgtggtggcacacacttgtaatcccagctactcaggaggctgaggcatgagaatcgcttaaacccaggaggcggaggttgcagtgagctgagatcacaccattgcactctagtctgggtgacagagcgagactctgtctcaaaaaaaaaaaaataaagccgggcgtggtggctcacgcctgtaatcccggcactttgggaggctgaggcaggcggattgcctgagatcgggagttcgagaccagcctggccaacatggtgaaaccttgtctctactaaaactacaaaaaaaattagccaggcgtggtggcgggcgcctgtaatcccagctactcaggaggctgaggcagcagaatcgtttgaacccgggaggcggaggttgcagtgagtggagatcgtgcctgtgtgctccagcctgagcaacaagagcgaaactgtctcaaaaaaaagaagaaaataaataaataaaaatcagagcacaagaagtaccagtccaccaactcacattttctatattaataattcttaactaaaagaagttccatattcgacagcattttagttttttaatagtacttattagcatcaaccatcttgataatcaccaagggaaaaattaaaaatacctagactgcaataaacctttaaattggattttcagtgagaatttagaagcaatcactacctttctcgtttcatttgtgtaaccatgcagcataggcactgtgttacatcatctttacgctttggtatttgaacttattacagaattttttctctaaattggatgtttctttatatgaccttggaaactgaagtgatcttagcattaaacaaaaatgctttttgaagcacctttctcattgatcacttagctgctattttagtcttaccaagaataagactctcacaattttttaaagagagtacctccctctctatacctttttgtcagtcattatgttgcatcgtccacaacgcctgttactatgctttgggctcaaagatggtcccagttgctgatctgtcatctgtcttctcttgtgccagtcactcacaggcatgaattataatcctctgaataacacagcaagatacgtaataccccctaatatagaaaaggaacttgaagctcagagcaagtgtcacttgccaaggctgcacagctaagtcaatggccaaatctggatttaagttcaactcagccagaatccaaagcagcttcttttagattcactatgccacatcccaccaaacccaacccagcacattgtattaggaaaaatcctaaaacttttgattaaatggtaaaaggaagtaactacctggagaaaataaggcttccgctaccttccgtcctccctcccagggcttggcaaaaagagatcttgagcatgaggaaggaacagcttcttcagaaacaggaattagctgtatgttggcttctgcataccctcttaagattcaatatggggcaggacacagtggctcacacctgtaatctcagcactttgggaggctgaggcaggcggatcacctgaggtcaggagttcgagaccagcctgaccaacgtggaaaaaccccatctccactaaaaatacaaaattagccgggcatggtggcacatgcctgtaatcccagctactcgggaggctgaggcaggagaatcacttgaacccaggaggcagaggttgcagtgagccaagatcgagccattgcactctagcctggacgacagagcgagactgtgcctcaaaaaaaaaattattcatatcaatctgacacataattctatataactgttttgtctcgtaatgagatatcaacagtaaaatagctagttttacacagtcgtacaaaaatttcccattttgacttcacaattatccagcatcagctttaaagtccagagttttcactgatacacaaacatgttattgattagtgccatcccataggtgacacaccggaatgacagtgtctggaaactaaatcaagttcctgacccaaggatctctctctatctgcccatttacctgcagcctgtggctccccttccccaacatggctgggagtcctggaatctgctgttcccagtcagagtaccagatacagaagtggtagaaactttgggccttaaggctagaactttcacctctgtaaagggaaggggccagagctgggagattcctatcatccagaggaagaggaggaagctgctcaagaagctggcgcccttttgggcaagtgtaagaaatgctacacttaaggccaggtgtggtagctcacgcctgtaagcccagcactttgggaggccaaggcggccagatcacctgaggtcgggagttcaa

SEQ ID NO: 24 - DNA, 246536 bp, Homo sapiens
  source 1..246536: mol_type = genomic DNA
tagtagttgatgcagtggactgggctgaatcacagaacatgcatatgcttttttttttctcgaataaatttttacaacatacaaggctctattgggggaagctctcattttacaaacaggaaaaccaaggtatagaggaattggagcccactttccaggtacatgggtgatttctggaccaggcaggattcttccctgcagtttttctctaaaactggaaactagcatgccactggcctgaacatgtaaaatgctaggaaagactgtgactgccagacagatggacttctgctcctctctgtgcctggtggccccagagcccttcctgaccaggcgtgggctctgcagggcttgctctctcactccccagaggccgccctggtaggtgggagactagaggcactgcttcactgagcttctcctgggtttccaggccgtcttggttttcagtggggagcagaggacccaaggctcagggcaggattccttctcatgcagaagttgaccctctgtagcacagggatttaggttatgcaagaaagatctcacaaagggtgtggaatgattccctacaaatttggtttaaagagaaaagagctacgtcttcgtctgagatggctttgccaccaggtcgcgtgccacagccatctggtagacctggttctggttcccggtgtcaccacccaattccccccaggcaactgtgattctgaaactgcatttttaaaagccccatgggtgctgcagatgacctgctgcggttgcccactggcctgaacggcctgtccgattccaggagagaggctgggagtggggtggggctggggtgctccaggggccttgggattgtgactccgtcatcccctcatgatgggaatttatgtggcaggaaagccgcagccaatgatttgattcttaattaatgccaagcctgacaaaggcgttggtgtctggcgcccctaggatgagaaactgaagagactttagcaaccacctaatccattctcccattagagagatgaggaaactgaggtcagcttggtgaccagccttgcaggaagtgttagcaactagttaggaatagggcaattttttccctacagcaagaacaagttcttgaactttgaatggcattgagtactggggccagatgccttcctagggaatgctggggggccccctcagtgcatgccagctgggggcctggccaagaaccctggtgggttgtggtggcccctccccagacccccaacttctccccatctcatgggagccatcaggtggaacagaaagctactctgccacctctctggaggcatctctcaggtgggtggtcctgattaaagggttgtccaggcttctgggaggactgggcattggcgggctctctgggacctgagccccacccatagactccttcacatcacaacccaggctttacgctggcctcagcacccctaaccccccaaagacgagcgggaaggagagatagagccctgtgccattagtccatttctttattaattttgacattggttcggctggtgaagggagaatggtctatacatcagagtagggtaggggattctctcccataacagagcatgtgggagagtcaagaaaagatccattttcataacaattaaaaaaatcaaggtaatttcaaaacttctaaaaagcgtctaatgtgcagactgcagcattctctaggcatcgtgtggagaccccaaactcctcccctaacggctcctactagcagccggagcgtgcagccatgccagccggagcagaggtgccaaagcggagtctggagctgcggggtccgcgggggcgctaagggggctactgggttggctgcagcagcgacctgggagaggaaggtgcaggatcgaggcgggagaggcgagccctgagcccagcttccttgggccgtcaccgaatcggtcccagccgcgctgtgcggcccccctgccgtggcccccgggatgggggaggatggaggggggcgcctctgcgccctggaggccgggccggggtggcctctggcggagacggcagccgtccgggctcgccctgcagctcctccgacgcagcctcggggaaactcaggcccggagctagagcttcctctccctgcccgcccctctaaaggaagcaaaagcagccccacccccggccgacaaggcgcctaggccgccccggggcctgcctggccgggggtgcaccggggcggatttgtgtgggaagcagggcccctctccgctcacaggccccgcggccagggggcctctgacgtggagggggcttctgtgctacttggaaggtttaagtgtgtcccgaggacactcccgcagagcggcggggcggacggggccgggccgtccacaccgcggctccaggggcgagaggagccagccctgtctctctctcctggccctgggggcgcccgccgcgagggcggggccgggattgtgctgattctggcctccctgggccggaggctctagtggaacttaaggctcctccctgatggcaccgaggcgaggaactgccagctgtctgtctccttcctgccttgacccagagcctggccccggcctctgggcgtccaggctctccgcctccgactctactctcaccggccatgcggtccggggagccccctggctcgcctctccaagaggccacaggggctgggcagaggggaggcactgaggcaggacagggaacagcctcgagcctggcacctgcacccagggtccccagcctgcaggctgcctggacttagagcaccaagttcactctgggagaccctgggtggtcctgacttctaagacctggcagatacattcactagccctactcctttccttcctctttcactgaaagacaggccacagctccttctcctgcagccgcagaagtcctcaggagctgcgctgtcaggctctgtacgtactgctaaatgtttctattggtttgcatagtatttattgtttttcatatacacaaggctgattactgtacagtttacactttgaacacggactatgatatagtgcttgaagacatagaaaacctcttctctatggacatgctggtgcaatcctgggtcagccaccggcctgtcccccaactgagagaggagaccctttcagatggggtcctggctccctttgagtcctacaggtaagcctgggggtcctcgcctcagattcttaagtccctaacacaaggaaccccgaatgcactcttcaaggtaatgattttccattggaagatgattcgtattgaaattggcagagagagagacaacataaaaaattccaatttatccacagcagagtctatacagcttcagaagtcacagtaaaatctgtgtgtagattcagtggaggcgagtggtgtgtgtgtgtgtgtgtgtgtgtcctgaatgtcatgtagagcgatctgggaggagcgtcaccagggagtcgagggggtgtcacaagtggaatggaggtatgtgggttggggagggtgggcagatgaggacatggcttaagattaaggtgttaaactgatttcatgcctagttttcttttttttttttttctttccaggaagcccacatggatttctgacagatgaggttgggaaaaagtaccctgtacgaagtcaaaacaatttaaaaaaaaaaccccaaaaccaaaacccatccccagccacaaaaagccctcattcacttttgcgttcgcaggctctcctgcgcttgttttctatccctctctctccccgcttcttgctgcttttgtgtcctggttccgacagatcagctgtcattgcaagaggcaggattgaagcctggaggtcatgcgtctacagtcagtcattcatgccaagaggggactagcaggagtcccttacagaggtcatgccgtcagcccagaggaatgtgtgcaccgctgcggtggccctcaggtccagctctcctcctgtgtgcatggcagagtgtgtggggttcaggggttgggtgtcgaggtgtgatcctgggagacacaaagagagaaggagtcacttagaatgcaaaagtgcaacgtccagcaaaaaccccacacacagagttttgtgctggcagctcaggccgaatctgactcaggaaaagcagtctccccaggcagggcgatgtgctgagggtgctgcacttgcagcccgacttcctgagatgccgccctccttctcttgctccctatgcagaggctgttcctcagagccgccacccaggcctcatgaattccttctgagtgtgcaagtgttccaggatgcctctctgtatgggccaaggagagcactgtgctctgtgcccttggagaggggcagaggcccccgtgcctacgtggtcacctggggagacatcccccagcagatccttgtacttaggaagagccatttttcttgagccagggcttgtgccaagaaggggctaggtgaggctaggtgaggccttcactttctcagttcagctctgccaacatgcactgatgtccgccatgcgccagccttgggaacccagggatggagcggatgtgctccctggccttgggagctcatgcctcaagggtgacagctccccttcagctctggcccacagcacttcctgaccgctgcctctggctgctctccccatgcccctcagatggacagagatctctgaaaagcagatgcatcctcctctcctcctcctgtattgagtcttaggctggaaaagagcagctttgctggaggaactaagcccacattcttcagcctgggattcgcagtgagaaacctctcctgcccccatggggcctccagcctccaacctggggtgaaaactccatgttttcaagaccagccactcatgttctatctgcaggggccctgggaccactggggaaaggaggatgcttcaataaggaggaggtgacaatctcttgggcagggtgggaagtgacacagggaggcaggagctcattcggaggtggagccatccccagacatagagctgttttgggtcctccaggtgaaggggttggggaggagtgttggaagggagtagggagaactcagctcttgggtggttccccagggatgggagggtggtgccaggttccttgccaggggctgctgtagaactgtaaagccaggaactgctgctgcagtgggtggacagtgctgccaccgtagagggaagatgctttcatcactgctgggccatcacatcggccaagtctgactgtctcctctaagcctctgaacacgctctaccctcctgttctctgccttcggtcacgcttctgtcaaggctgccttccattctcttttctgcagaggttctgcctgccgccctcaacacctccaccccacaaaaccttcctgatccttcctggagcaggcccctctccactctggaagctctcccttttgtattttgtaaaaatacaaaatacaaaaaagaaaaaagctgccttttctgttcaggagatggcagagtcgagtgggtaagagcatgaactctggagccagaccacccgggttcaagtcccatgctgcctgacctcggtcaagtgccttacctgctctgtgagtcagttttctctgctgtaaaatgagggcagtaatagggcctacccattagagaggtgtgatgtttaaaaaagctaagacacataggtgcttagcattgtatgaatgcaaacaattacttggctctctagaaatgttaccgtctctgtccatctgtgctttttgatgtctgcatatttccctgactagattagaaacactgagggcaagaacagcctcctggtgctccccacggtgcctgccccaagaagtgctcctcaaataagagaccatcatggaatatgcagcctgggaaagacaggctaggatctcccatctactttaccgcccaggcactgagcagaagagaaagttcagacctcagagatcatgctggcatgactgcccatttcatcccttggtaaactgagactctagaggcacagtggcaagagcaggggtgagatgaggacctaggccacctcactctgcccaggactcctgcattgttctggcctcttctcctgggtcccctcacctttcaaaagcttagaaaagagtctctttcattctttatttttatttcatttagagacagagtcttgccctgttgcccaggctagcgtgcagtggtataatcatagctcactgcagccttgaactcctgggctcaagcgatcctcccacctcagtttcccaagaaactggaactacaggtgtatgccaccatgtccagctaatttttaaactttttttgtagagacagggtcctaccacattgcccaggctcatctcaaattatcctcctgcctcagcctcccaaagtgctgggattacaggcatgagtcactatgcccggccctagacagccctttcacaaacataaactcagcaaccatcataaccatcctacaagggaaatgctggcattattgctagtttatggctaaggaacctgaggcttagggaagtcatttgacttgctccgagtcacactacaaacaagacctgcaattgtttgagtcccagagcatatatgttcttatttactctcttcacatcagtgctcacagttaccattattatttctaaacctttttcttgaagtgtagcacattcgaaagggacattttcatcctcccttgaggagactgaagcttagggcggttaaatgacttaaggccatacaacctggaagcaggaggaggccttgattctagactcacaagctccagctttcactctctgaaacaaatacagccatttgccatagctctgttctataaattagtcgctgtttgaggctgtgcacagtggctcatgcctgtaatcccagcactttgggaggctgaggagggcgggttgcttgaggtgaggagctcgagacgagcctgaccaacatggtgaaaccccgtctctactaaaaatacaaaaattagccaagggtggtggcacatgcctgtaatcccagctactcaggaggctgaggcaggaagatcacttgaacccgggagatggaggttgcagtgagccgagatagtgccactgcactccagcctgggcgacagagcgagactccctctcaaaatataaataaataaataaataaataaataaataaataaatagtcgctgtgaacacggaattagcaaatactgaaccactgctcctaagggaaatacaaggttaggctcccatgagcctctggccacaatattttggtcaactgatgaatacataactttgtgttaaatgcgtttctgtttcaagacgccttatgtaatatatagggttgactcattaacactgacttcaccaccacaagcactctaactcatccctgagcagagcttatctgatgtccattccctccttaaggaacatcccagccttcttgcacttcgcaccagacagcacttcagcactgccctcaggggccattctaaacaatgaaaccaaaaatgtgaaaaatgtggcactacacaagctgcaaggaggacacttatttatagtatgaggcacagaggcagagtgtggcattgttcatcctcagctgggattgcacgggttgggcgactcaaactttctgcccttgtgtgtgtgtccatgaatgagccaaagcacggtgagtgccagctttggggctacagataaatgttagcgagtggacgaattcgcaaatgcagaatccgtgaatgatgaggatcgactgtacatgcttgtcggggatgcggatagtaaattaggaagcctttgggccctcaaccgtcttctctgtagcctttgccctggttgggagggtagggcatttaatgctgtcccctaaccctctgggactttggcaggagcttttctccgcctctccctcaccactgctctcgccccaccgccccacccccctgccaccctcacacttgtccctgtgcctgtcactgacagagggccaagtgctgtcccagagccaggctgctccgtgtttctgacacccatgctagtgtggtccggtccttaatcacctgaggttggggggcttcagccacattgcagatcacttacggcaaattaaaatgaaattcaaggctccctccttccccctagcctggctttcgggctgcctctctcccactcaggagcatccatagagcctgagccaaagagaaatttaaagccacagccgccactgctaccataagaaaaataagtcagaaaagtgtacttttcctttccctttgctgcttttaaacattatttgcatctttgggttctttccaggacccaacagcagctactcagagtcttctaaaccagcagcctagtgggacccctggcagtgcaggggttaacacggtgacctccttaagctgctgaggtgtcaggtctaattttatcctataactggatctgccagtcctcttttttgcccaagtgctgagatatattgggaagcccagagtcagcacttttggtggctcaggaggcagcgggccctgatttttgccgaatgcagaaagctagagcctccttgctgctcggtcccagagtcaggccctggggtgtgaatggtaacggcctggttagtgctgcactggggccaccatgccccctcacctcctgctgactcccaccccgagtatcctgtactgagctgccccgagctgggcagcatgaagggcctcggggcagctcagtacaggatgccccagggaggatggagatcagagccggccgctgaagcccccagcaccacacacacctgctggagatggtcgcacagcgtcttcatgtcccttcctcatggcacggcacggcacggcatgcccctgctctgtggccacactgccccatgctcacacacatgcaccacagcccaggccccggccccaaccctgacggtctcctgacttgcagaaagcacgtcgtccaccccttaggcctgtcggctcagccctttcctagaaagcaagggagcaacgtgtttcacaaaacaccaaagagaagctaagccttggcctggtgagaactgtagctgggctccaggttcaagagacagtccagtcctcagtcttggagctcttatgttgaagcatcacagcccagaccaactctcctgtcctcttcaatgccctgtccactgctttctagatccccattgcttggtttccaagataatattaccacttagatttacagagtgcttttacttttcaaagagcatttttttctttctggcttttttttttcttttttttgtgatggggtcttgctctgttgcccaggctggtcttgaactcctggcctaaagcaatccttttgcctcgacctcacaaaatgctgggattacagacatgagccactgtgcccggcccaaaaggcattcttacaaaaccgtgcggtccctgataagtggatattattaactctgtttccttgatgaggaagctggggttcagagccaactgttagcagggttgggaagtgagaatctctgcctcgagacacaacaacaagttgtttgtcccacatcatgctggggtggctgggaggggatagggtgagacagggagcagccactccactgaagaccaggccatgcagaggggatgagaagggcagcgttacctcccgagaggctactccaaggagagcggctcggggtcactgtttcccccttttcaggctggcccgcttcactatctgcgcccccttcctgccctctatcaggtccggctgtaggccactccctctcagctccacctgcagacagcagcagagacagaaagcaggacagatcgcaaagacgggcagaacacaggcagaagatcgaaaggaggccacacggaggtggcagacacactgcccaccagggagaagagagactggagagagagctcataaagaggtgagtggagggaggtgtcatgcagacggcccggcagagcaaggcagcagtgatggcgctgggtcccccagggccgcgggcgcctcagtaccttggagtgtttcataaagtaatcaatatcgacctccagctcactgggatcctccaggggcccctctacagtcacctcctcgtgctcctgggcggcatcggcgctggacaagtctatctgtcgaaccaccttgcgaatgatctaggaaaggaagggaaggaggaaagggctggtcaggccgggctcgggggctcatgtctgtaatctcagcactttgggaggctgacgtgcagatcatctgaggtcaggagtttgagaccagcctggccaacatggtgaaaccctgtctctactaaaaatacaaaaattagcccggtgtggtggcaggtgcctgtaatcccagctactcaggaggctgtggcaggagaatcacttgaacctggtggatggaggttgcagtgagctgagattgcatcactgcactccagcctggttgacagagcaacactctgtgtcaaaaaaaaaaaggcgggggggctggtcaagccctcaagacagagcttcagaacagcagttcccaggaatgagctccgagggggaggtagcttttgtcctaggagcccctccttgagaggccaagaagagggacagcctttgccccattgcttaatggaaaaccctctgctagacagccctgaaggggccttggcagtgtcatttcatgaccaaggtgtgactgggtgtgacctccccctcgagcccacagccttctgttttgctttttgatatggatgggagtttgtgctcttccccattctactcccatgagcctaagggcagagggcatctctttttcacccacccattcccgtattcacctgtccaaatcttcaaaccctttactctgtatctgccgtgtgctctgagtgggaggtgaaacatcagtgagacactgtccctgcctgcaagcagctcacagtgcaggaggcaagacagacgcacaaggagccttgctcaagggtgatgagagctgcgcctaagcagaagcacattcgagatcctgcctcagctcctcctctattttacccatagctagcaccgtgccccacacttgacaggcaaggtcatgtctctgagttaatatctgctaccaatccaatgcattttcacttccttttaattatttaattattgtgatggggtctcactctgtcacccaggctggagtgcagtggctcaatcatagcttatgcagacttgaactgctgggtttaagtgatccttctgcctcagcttcctgagtagctgtgactacaggcatgcgccaccatgcctggctaattttgtgtgtgtgtgtgtctctctctctctctctgtgtgtgtgtgtgtgtgtgtgtgtgtatttatttattttttaaaattttttttagagatggagtcttgccatattgcccaggctggtctaaatgtctgggctcaagcgatcctcctgccttggcctcccaaagtgctgggatcacaggtgtgagccagcacacccggcccacattctttttatttgaggaggcccatggtaggccagggatgctcaaactgcttgtttaacagctgttttcagggttaggcatcatgggactaggtctgggatgtttcctgggggctggcccttctggaaaagagcagcagaagctattcaggttgactcagacaaagcggttgtgaggacaccatgactggactgcagatgaccaaagctcccagctcctgggccctccatccctcctgagcacgggggcagccagcctggctgtgctcacctgctgtgagggcagcagggagaagccactggcttctaccaccttttagcttctagcccacctgcctctccccagcacagaggggaacactctgcacccaccttcttggtgacaatgttgccctgctcatccgtgaattgctcctctgtcacctgctcccctggaatattctgaaactcattcccctggaattagagaaagggagaaaatgcaagattggtgagtgggagtctgggaggaagggtggaggacgaggaaatgaaacagcagtagccacaatagccatggcccaataactcccccagcaggaaacccggctcagcatgtagcaggagccatgccagggctcccagggcgtgggcggcgcccctgagggtctgggaggcctgaagacgaacggtcgagctcacaattgtgcacttggccctcacaacaccccctgggaacctgcaaaatgggggcaattatgcaagtctgacggaggaggccctgagagaggaagtgaggcacctgtttcctatttttacagcactttgcagtatagaaaagcccttcgacaggcagcatcacccagaatgtgacttgcttgaaaccccagagccagttggtgacagaaacaggacgatccgggtgcaatcccatggtggctcacgcctgctatcccagcactttgggaggccaaggccggaggaccacttgagcccaggagttcaagaccaatttgggcaacatagcgagcccccatctctacaaaaatttttttaaaatagccaggcatggtggtgtgtgcctgtagtaccagctactcagaaggctgaggcaggaggatcacttgagcccaggaatttacagtaagcccaggttacagtgagccatgagcatgccactgcactccagcctggactaaacagcaagacttcatctctaaaaacaaaagaaaaaagagaagagaagagagagaaagaagaaagaaacaaagaaagaaacaggatgagcgcagcctcccgagacccaaagctgagtgtttaatgtcactgtcacaatgcactgggcaccagagggcaggttctggtgggcgcacacacactctggctcccagggtggaacatgatccctgggggcctcctggtccttttcctccggcgtctcccaactctgggtccggagctccccacagcagcgtcccctcagccccggcctccggcgcccacaccaccagccctgccggcctcctgccaggcggttaccttcaggaagacccgccgccggaccaccctggtggagatggtctcctcgtcgtcactgaggccctcgctctcccccagctccttgtccagctcctggtggatgtgctttagcacaaagcacagggaccccctgacaatgtgcatcacgttctgacagctgaccaggaagaagctcagcagcaccagcgtgaccaacagctgggtgacgaaagtccacatcctcgcctcctcaccagcccggtcctctggcagccagggccccggccaccacggggggcctgcctctcattctccactgggactcctgagtcccccagggaccccttgcattccccctccctatctctctggtttgctctcttggtctctcactgtttctctctctgtgggcaggacaccgaatggccctctcggctgaagcagcccggcccaagtgcccttctgcccagcagccaggctctgccctgagtggcccgggtgacatcacgctcctataattttacctccccaaaccagctgccggagctgtccaaccgggctagaaggaagccggcaggtgcccatgtcctgagcactgaaagcacaagtgaaagtcactgtgtgagtgacacccgctgctgcctaaccccgccctgcccagagacctggaagtgggggctcggcctctcacctatcctgcccatccccatgggaactagaaagagttctgcccagggaaagtttcttactttcagaaaataatacagtccgagaaagcagctacttgtgtgtctccttgggctgctactgcggtgatccaaatgctgttccccggcatggtagggatgagaccagctaataccctgggtacttagcggtctgtttcaaaaattgctccaaaagggtgagtgatgggctcagggacagtcaagtgagcccagcaggggcccagcacaggtggtggggccacctggaagccggtctgtaattcctgtcagcccacaggcccttgcacccttcctttatggggtacagcctcccaaaactgaagcatggagctggtgtgtctatttaaggcctgttcttaaaggctcttccagggctgggctatcaacgcccactgagcaggaacaacgcgtattaaacttgtatttacagagctgattcacaaatgtagccgcagcagctgcggctggaaaaaatttcactttctagatcaggttgttcctctctgagtggcaatgcagcatggcagaaagaacacagatctgggacacagcagactaaccctgcaactcacctactgtggggtcttgggaaggctggggaccttctctgtgcctcagtttcctcatctgtgaagcacggattaaagtgctctccccaccctttctcaaggctgctgggacaatcatgccgcttatgaatgctaacactatgaatgataatggcaaacgcttgtgatagtgcatggttctatgtggatttcgcattaattcactgacacctcaccacagtcctaaccaaggaggttctatcgtcttcccattttacacaaaggaaacagaagcaaagtattctgcctaggtggaggagtaagtaaacggaggagtcacattccaaatgcctctcactccacaatgctgcttatttcaacaagaaagcacggggaaaagtatgtgcaaagaagccggggaagcatctggttttggcccagtcaagaagagtccaacttcagatatttcctcctaagtcctcagagaaatcagctgggtcacagtcatttcaggccacctcccaagtcccaagttacatgcaatctctctatctccatcactgttttcagaggtccagtggaaatactaataagtgggtgctttgcaaaccatcaatcaccttcaagggcatccttatcagccctcggggcctgtgagatgggcaccggcagcagcctgccaggccctctgatcggcgtctccagttccaggctgggcatgctggccttgcacgtgcatgctggacgtgaggatgtagggcttgggaactgagggatctggaccctcctggtccctgacattggtccactgtgtgaccctggagaaagcccttggctcctctggtccacagtgccctcatttataattgagggagttggatgtgtgatctagaaggcccttccagttcccctcaccaaaggctgaccacagaggggcagtggaaaaaagtgctgtaggcgtctttctctttccccagggattcaggagaagagacccagttaagatcatgtgtgctctgggagcaggagaactaggcgcccaggagggcctgatggaagaaacggacgggccgcctgtggtgaggagtgcacacaggcgctggccctgcccggggcacatacttggcaggggagcattctaaataaaacctgactgaattcctagcagttctatggctggcagctcagggccttccttccagagccaccctagtcctggagtctaaggttgaggtaggaaagaagggagacaaggaaagaaagagaggaaggagaggagaggaggaagcaccatgcctggatgaggcgtgaaaacagagacagaacatgtcgttcatgtacatactaaacacacgcatgtggagaacagtggtgcatgttttataagaacacaaatggaaaagacacccattaatacgatggccaggatatgcttccaaataatagtcagtgggagaaagtggggggtgcagatgaaacaagattggccacgagtagatcatcatggggcctgggaatggggaagggggattgaatcgaacaaaataaagttcaacaaactcgaagggaatccggggaagtggaagaaaggagggagggccaggagagggagaggcctgggaaatcaggagcaggagaggagacttctctctatcccagggcccctcttctacttggtgaccgccatccagagtccacgtgaatagccacagaattccagagccaagtaactttggcgacattccaatcactccctcctttaccagtgaggaccctgaggtgctgggaagagagcgccttgggcacgtcacccaggtcaccataggaggagagtaagcccaacgcccagtgctcggttcctagccctttctaaaacgcgacagaacaagaaaaccaacaaaagccacaactttggagtcagcgagacccagcttagagcccacttctgaaactgtgatcttgagcaagttgctcagccactctgatcagcagctgcccaacaggtacaggcgccttagcagggatccaggaggcagaaaggcaggccttgcccttgacttctagagaaacggaagcaccaccacaagtgttaaaggaaggggatatgcttagctcagggcttgagtgcctgagaggcagccctggagtcccggccccttccgatgctgggaaggaacagcagcacgcagctcccctcgggctctcacctgcaccacttgggtgaaggtgttcttggcctcctgcacctgctcttcttggccttgctgcctccggtccctgtcggcctgggagctctcagcctcgggctgttctgtccacgtgtgctcacttacagacaccaggaccttctcgtactcctgagatccaccgggctctagcccttcagtcatggtacttgttccctggaatgagtgtggaccttgcgtgacctcctcttgccaggaaccttgtgcagcatcttgcaggtatgagacaatcgagccgtctgcatcccagtcctgcagtctggggtccagaagaagcagcagatggccggccggggagagagaaaagacacctggtcacccatcagtctcattccttttagacactctccccacccagagctctggctcatcaaggacacagaccgtcctcccatccctccaaaggtcaggggcgcatgagcacattgctcacctcactgctgtggttcagaggggtacacgtggcccatctaatgctgtccaggtggaaaggccactggtccctccctgtgggtgaacagcttgcccttggggctcccagagcacttggctcaccctaatggtccaaacactggggcctccacactctcatcccacatcctcaaactctgccaccacctccttctgctctccaggcccttcccactcagcagtcctcatctgacaaggtggtcattctctccccctcaagacacattctcccgtggctcctggaaggtgctagcctggcgtctcccccttcctctctggccgctgttgttccatgtcctctgcttgttcctcctagctttcctgacttctgaacataggagcaccccggggtgcagttctcagacctcaccgctgtccacatccacttcctaagcaagctcattcatcccatggttccaaagcccatctctacactcagcgtgcctggatgtgtgtctccagcttggctctcctcctagacctacagctgtgtgcaccccgctgcctcctccacatctttactttgttgttgttttctgagacagggcttcattctgtctcccgggctgcagtgcagtggtacaatcacagctcactgcagctctgcactcctgggctcaggcgatcctcctgcctcagccacttgagtagctgggactgcaggcacacgccaccacgtccagctatttaaaaaattttgtagagatgggttctggctcacaggtctactttggatctctacttggcatctccaggacagtgcgatccaatccacactcaaaatcttctcccctagcctgtcccaccccatccctgctgccatccctggtatcttcatccttgcagtgggcaggtcgaggacaccactgccctccttgacccctctcttcctctcttaccccacattgtatttgttagcagatgcttctgaaatatgccctgcacccgcccacctctcagcacggccaccgctgccgtcccagcccacaagcccacggccctttcctcccgacacacctcctgcttctctgccaggttgcgccagcctcctctcaaggcaggtgcagcttaccctgctcaccattccctccctagcttcatgggcttggttactctgttagggcacgtgccaggcacggtctccttcaaagggctaggccttctgtggggcatcctccctgagatgtcctcaccctcaccctcaattccttgaagtctctcagctggcactcatgcaggcctcccctggccacccatctgtaattccagtcagccttctttccacacacacgcctacctcctgtcctccttctctgcttgatttttctttttagcacgtattatctagaatttctgttttaatgacttctaattttatttactttatcttgtttctagttagtttccctgctagaaccacgcttcttgcaggtagagacttttttctgtttcattcaatgctggcacccaggcactctttattggtgcctggcacacagtaggcactcaataaatattgttgagtaagtggatgaaattcatctgtccccatgagaaggctgaccaaggtcacagcaccaggaagtgacaaaataggcctagagcccaggcgttcatgaacccagttagcaacactgctgcggtaatgcaggggccagcatgcagcccctgcaggtgctcaataaatgcttgttgaaggaatggccgtcccaggaaggtgtctctctcccgggaaggccactatttcactttaaaccagcctaagctccatctgttcaatcctccccatgaatccaaagatttgtgtaggaaaaaaaattaaatctttgctgtctcaacttccaaacgacttcctttcccttcctgttagggtattggggccaggctgcatggatcctgtggaatggccccactagcctgggcctcagggtgggactgaggggtcacacaggtgggactgaggggtcacacaggtggggaaaggacatgagaacagctttcctttacctgaccagtcctgagctccttggggtgggggcctggaacagctgcctgggggcacaagaaccatgtccttactttagggaaaactcagcaagccaaggtgacctggaggaaaggggattcctctgtcatccgcttcctgtgctagcccaggaggacaacgtgagccccatctcatgtctgtctcatctctttctacaatggcaagggcctggcttgtcttggcatccttccctgcactcagcggaggggcatggtgtaggccctggcccagatgggacgatgagagctccaaggtgagccggtcctcggccgcagacttgcagtgtctgggaaatgcatcaccttctcctgacctgccgacgctgcttttctgctgcggcacagggcgggggcttctcagtgcgggaagcgtggggaagagagcacccactgctctacagctgaaagctccgtcctgccccagttaagcccaccagcccctccttcaaagggggtaagtggggagggcgccattatcagctccgtcacatgcaggctgtgtgactgcacacaaataacttccctgggtactggtgcttctaaatatggtcttcaactaaatatggccttcaaccggaagcacgcaaggggagaggagctccgaacgccagctccagcagcagctgacccacggtcttccccagcctcatgattgctcttttaagtgagccatcctggtgctctaatgtccctaagtgagcccttcccgtgcactaatggctctaagtgagcactccaggtaccctaatgtccctaagtgagctctcccggcaccccgatgtccctaagtgagacctcccggcaccccgatgtccctaagtgagccctcccagcaccccgatgtccctaagtgagccctcccggcgccccgatgtccctaagtgagtcttcccggcgccccgatgtcctaagtaagccctcccagtgccctaatgtccctaagtgagccctcccagtgccctaatgtccctaagtgagcactccaggcaccctaatgtccctaagtgagtcctcccggtgccccgatgtcctaagtgagccctcccagcgccccgatgtccctgagtcctcccggtgccccgatgtcctaagtgagccctcccagtgccctaatgtccctaagtgagccctcccagtgccctcatgtccctaagtgagcactccaggcaccctaatgtccctaagtgagccctcccagtgccctcatgtctctaagtgagctctcccggtgccctaatgtccctaagtgagccctcccggcgcccatatgtccctatgtgtgctctcccagtgctcctcggggtctctcctgccgggcatacctggtggggtcttggggaggcactggcttttgcagatggcacctatgctcttatatatggcatctgccagactgaatgtatgtgctcctgtgcaattagaacccagggtcagggttggcatcgacacctctgtcctcactgccaggcataatcttacccaggagcccagaagacaaaaagggaccctgctcccacagtcaagctcttacctgtcctgactcctctccgtcacctgactcacggtgggggaatgtgtgattcgggcttgccccctctgatggcctgaaacaagagacacttcattctctgagtcctgccctgcacctgtcgcgtcatcctgcctcttagaacctggcagcttctcttctgacctctgaccttcctcctgttcaagcaaatcgataaggccatttgtggcatctgaatccactgtgtcgtcctccacaagttccagagagcccaactcggggccccgcggttcctctgagagtgccccctccaacttccactcgtgacctgtggcatcagagtcctcagccttgctacactccagagaggagtcctcagcagtgaccagagaaggcgtgaggcccgcagaccacacctgcatgtcagacatctccagcatggtgtcatgctccgtggccgccaaggggatggcgtctaggacggccacctcattccagtactggtctgcacgtagcggagaggaaagtgcacagcccagggaggcaggggacagcagctcgtcctgcagtgaggagtaacctggatgggcagacagagggcaacatgctccagcagtgattcctgtcccacccattcacgtgcaggtccacgcacacgcacgaacacacacatgcgggtgcggccacagagatgcatgcacattcggggtgggttgggggctttccaagctccaggcccaatgctcaggccttgtggctgctgcctgggcatccaggcaagagaagcaaggctctgaattgggtgggggcagccagggtgtgaggcagagatgggggagcgccctgctggatggcgaagaggagattggactttcttatccagttcagagcactagataaagaagcctttatccaaaggacttgtgctccaatctgtctctgatcccatgaaagctccacttctccatggctgggcagaagtagacgttgctcctctactcaaaacttcactttagcttagctcttaggttctcagggatgtaccttaaagggaaggaaaggccacccagaaccaggggtagtaaccaggctgcccttgaggggcctatcagggtacactaaacacccatagacctcactgtggtggtcaaatgggaaacaaccttctggtgtggccaggcatcactttcctcaagttgcctattggttccagaaactctgcatgatctaaagtgctacaggggagggctcttagggctcaaaaggggcaaggtcagaaggcaccaagaggcaccaggtctgcccgccccaaaaccctgtgtccaagagccctgagctgcttgtcccagctgcaggtcagcaccgacctggtgggatgggagccagcttgctcaggccctgagtgcatgacccgtgcattgacaggaaaaagaggactctgatgccccttcagagcaggtgcctctgtgggtgggagaagagactagaagacaagattctccaatgggcttggcctgtctaggaaatcaggaagcaagtacgtgcttacagcagctggaaagcccacagagctgaagggggaccctgggaatgggcagggctgccccttgcagtctctagggaccttcctgccatcgagagatgtccagacacccccagcctagagttcaaacctagttcaaatgctccattctgccattcagcccctacccccactcctactcacatgcaactgcccccgggctgtgctttgattcaagccaggcgggctcctttcttgccccctcagcctccgctcggggcctcagcctccgctcggggcctcagctcctgatcacctgctcccctgcttttacatcactagctccatttattctcatccactcactgttcaaccaaaataagagaggtccgattacatgccaggcactgtgctatgggaatggggatgacaaaccccaaacacacatgcacacacacacactcacacactctctctcacccacacactcacagatgggacagcttcttgtctcatggcattttcccagcttcagctcctgttgctccctcccatctctgaggctgtcctagggtccctcgctaaggcggttctcagaaatgcaaacccatgaggacagggctgatgcctgccttcctcgccccaccctttcctacaacaggattgggcctccactagccccatgaccactgaagagctctccaggtgtgtgagaggacccagcagctggaacagaaagacctcaggcacattcagtggaactgcaattgctaacatgtacctgtgtgttcaacgtgcccggagccatgctgtgtactccgcatgcattctcttaatctcccagggaagttttcttccctgcaagcctacttggttccaggtcccaaatgagcggggaggatgagcccgtgaaggtggggtggttgggagaagggctgcacagcggcagagactgagggaaaccccttttagctctggccaaactaggaagaacaaggaggaaggagtgggaagagtaggtgaaatgggtgggtcacatcttaccatgaactgaactccaagtcactgtacatgaaactgtgacttgaggaattatatagctgaccagggccatggccttcaaacccttcatagaaaaccctccacatatacaaaagcaggacattttggggtcaactgatgattatttttcttattactcttgcgagcattttatattatttacatcagttactgagcattttgttgttttttaaagcagagtcttgctctgttgcccaggctggagtgcagtaatgcaatctcagttcactgtaacctctgccttctaggttcaagtgattctcctgccttagcctctccactgggagtagctgggattacaggtatgcgccatgacgcctggccaatttttgtatttttagtagagatggggtttcaccctgttggccaggctggtctcgaactgctgacctcaagtgattcgcttgcctcagcctcccaaagtgctgggattacagggttgagtcactgagcccggccactgagcgtatttttagtgcaaaacatatctaacatgtttttaattgccacaacaaccacatgaggaaaataatataattcctactttatagattaggaaactacaggtttagcaacttgcggaaggccatacagctagtaagtttggtcttttccatagactttgccattaatctctattaaaaatagctttgttgaggtatgtttgacattcaataaatgtgtatctttaaaagggggtaaattgatacgttgtgacacatgtgtacccccatgaagccatcacttcaaagaagaaaaaggacatttgtcaccccagaaaggtctcctcaagcttctttgtaatctctccctgccctttccccctctgccaaccccaaaccattcccaggtgaccccgatctgctttttgccactacacatcagtttgcatttcccaggattttacataaacggattcatacagtatgcactctctctttctttaaagcctggcttctttcactcaacgtagtcaatttgggtttcatccatgctgatgcatgtatcaataatttatttctgttgctaagccatagccctttggaaggatatatcacagtttgtaaatttatttacctgccaatggacatttgggctgcttccagtttgtggctattacaagtaaagatgctagtctgtatggacataatgctttcttttctcttgggtaaatagctaggaatggaatgacttgattgtacagtaggtatatgtttaactttgtcagaaatgatcaagtggttgtaccattttgcattcccaccagtggtgtatgagagttccagttcccccatatcctcaccaacacttgatatggccagcctttttaattttaaccattcttttaggtatgtggtggtacctccttatagttttaatttgtatttcccaaatcactaatgatgttgagcatattttcatgtgcttatttgccatgtgtatatattctgggtgaaaagtctgttcgaatctattgctcaatctaaaaactgagttgttttcttattattaagttttgagagttctttgtatattccaatactatagcagatgattatttgccaatattttctcccagtctgtagctcgtcttttcattttcttaacagtgtattttgaagagcagaagttttgattttgatgaagcccaacttgtcaatttgttcttttatggattgtgcttttggtgttgtatctgagaaatctttgccttaaccaagatctttaaggtttttttcttatgttttcttctagaagttttatagttgtagatattacatttaatctatgacccatttagagttgatttttgtatacaaggtaataatccaagttcatttcagtttagattttttgcataaatgttcataaatgatattggtttgcagttttcttgttaattgtctttcttcccaatatcagggtaatgctggcctcataaacttaattgagaagtattttctcattttcaattttctaaacaagttgtttcttccttaaatgtttggtagaattcaccagtgaagccatctgggcatggacttttctttgtaggaatgttccaaaccatacatttaatgtctttcatttatatggggctatatctatttcttcctaagtgagctttgatagtttgtgtctttcaaggaatttgttgatttcacctgttttccaatttactggcacaaaattgtcataatatccctttattgtccttttactacctatagaatctgtagatattctataggtagtatatattccttattcctgatattggtaatctgcaggtcttctcttttttcataatcagtctggctagaggtttatcaatgttattgatcttttcaaatcaccagcttttggtttcattaagtttctccaagtttttctgctttctgtgtcactgatttccactctgatctttattatttcctttattctatgattttgggtttaatttactcttctttttctaatttcttaaggtagaaaagtctttattttgctttcatttttgaagttacgtgtgctaggtatagaagtctaggttactttggagatgttatttctttcttctttaaagatgtggcatactttaaagatgccacaccatgttctggcttctgttgtttctttttttccctttttctttgttttttttttttgagacaggatttcactcccgttgcccaggctggagtgcaatggtgcaatcttggttcactgcaacctctgcctcctgggctcaagcgattctcctgcctcagccttctgagtagctaaaagtacaggcacgcaccaccatacacggctaatttttgtattttttgtagagatggagtttcaccctgttgcccaggctggtctcgaactcctgatctcaagtgatccacccacctcgacctcccaaagtgccaggattacaagcgtgaaccactgcacctggccttggcttgtgttgtttctaataagaaatctgatgtgaatcttattttggttcccttgtacataacacatttttttccctctgattgcttttaagatttttctcttcaccactggttttgaccagtctgctaataatgtgccctgatagagttgctcacgtgtttcctgtgcatgcagttcatcaaacttgttggatctatgtcttcatgatttttatcaaatttggcaagtttctgtccatatttctttttttttctttttctttttttttgcgttgagaactctgtcacccagactggaatgcagtaatgtaatctcggtccactgcaacctccacctcctgggttcaagcgattctcctgcctcagcctctcaagtagctgggactacagtcatgcaccagcatgcctggctaacttttgtaatttttttagtggagacagggtttcactatgttggccaggctggtctcgaacttctgacctcaagtgatccgcccacctgggcctccaaaagtgctggggttacagacataagccactgtgcccagccccaaatttcttacaatactttttcttccttcttttctgttgggaactgtaatttcacatattaggtcacttgaaattgccccatagctcactttgtgtttctccaaaacagaaagaaaagaaaaatgtttggagtttctcttgctgtattgtcaagttcactaatcttttcttctgcagtgtctaatgtctaatcccatccagtgtattgatcctacacattcatctctagaagattggcttgggcctttaaaaaatatcttccatgtctctacttagcttttttgaatacctgaaatacagttacaatcaccgttttagtatctttgctaattctttttttgtttgtttgtttgttttgagacagagtctcgcttttgttgcctaggctggaatgcaatgacactatctcggctcactgccacctccgcctcctgagttcaagtgattgtcctgcctcagcctcctgagtagctgggattataggcgcctgccacctcacccagctaatttttttgtatttttagtagagacagggtttcaccatgttggccaggctggtctcaaactcctgacctcaggtgatccgcccacctcggcctcccaaaatgctgggattacaggcatgagccaccatgcccagtcctttgtctgctaattctaacatctttgtcaactctgggtcagtttcaatggatcgatttttctccgcattatggatcctgttttcctgcctctttgtgtgtctgattacttttaattggatgctggacattgcgaattttaccttgtggagtgctggatgtttttgtatccgtgtatgcttgagctttgttctgttacgcagttaagttacttggaagtagtttgatccttttgcattttgctttcaaattttatcagggaggactggagctttgggggttaatttttccctatttgtgagatgagatccttctttgtcccctgaacaaaggccgtgagagatcaattgggaatagctggctaatactcatctgaaacttgtgggggactccagagtgttctatctgtgcaactgtctcctctctggtgctctgtcttgagaactccagctgtcttggtcttcctggactttcttttttttttttttttttttttgagacagagtctcactctgtggcccaggcgggagtgcagtggcgcaatctcggctcactgcaagctccgcctcccgggttcacgccattctcctgcctcagcctcccgagtagctgggactacaggcgcccaccatcacgccaggctaattttttttgtatttttagtagagacggggtttcaccgtgttagccaggatggtctcgatctcctgacctcgtgatccgcccacctcggcctcccaaagtgctgggattacaagcgtgagccaccgcgcccggccttcctggactttcaaaatggtaaactagacagctgtagggctcacttcatttatttcccatgctttgtggatcagtgtcctttgttatttgatatccaatgtcttgaaaactgttgtctcatatagtgtgtccattttttggtctgcagtagtttcaagcaggagggtatattcagtccctgttatcctgtcttggccagaagtggcacacatcgcacctgacacagctccttggatttggctggatgaacattccatcactccttggaattgcgatgagacttgagaactgggagagggcagctttgcgccacagaacacttgaggctcattcatggattccttttgtgagtttcccaccttgagacttccacggcatttgctttagtggaatttcacccaaataaagatgtaaggggccgggcacagtggctcatgcctataatcccagcacttagggaggctgaggcaggtggatcacctgaggtcaggagtttgagaccagcctggccaacatggtgagatccccgtctctactaaaatataaaaattatctgggtatggtggcgggcacctgtagtcccagctactcgagaggctgaggcaggagaatcacttgaacccgggaggcagagaggttgcagtgagctgagatcgcaccattgcactccagccagggcaacaagggtgaaactctatctcaaaaaaaaaaaaaaaaaaagtatggatacagagagcacatgtaccacctctgcaggaagtccctacttgtcttcactctgggagtccttccctggtaacagcatttagggtacatgcccagctgctccctctcccagccatgctggctgagatccaaggccacaggtagctagctgtattgctggtgctggtgggagtcactatgaagctgcagcaatacttgcagaagcacaagtgcatcctcatgaggaacatctcacaggtctggggtggaccagaccataggcagatccactggatcccccagggtgagttccagaatgtctgtctctctggtagtctcatgcagccccaccacacctgggtcaccagcccctccctcagtctagaggcctcctcttggggctacatgttggagaagtcaggtaaaaggcagccacacatattggtttggggcagcatacagtcaagtggtccctgctcattccaggtcactgccctggttctgtgctgacccagaggtaataatcgtcctgctagcttaacgtcagcagcaaatgggcaacaggggtcatcagacagcctcaccctagacaaggccacacttcactagccacagttgtgaagaattgagggaaataaaacaagttttatttccaagtagacattagtttgtgtctgatttatcaggtcaaatggaactcacacgggtgtgagatgatcatttctcctctcataagggaagtctgttttattttcagaaacatgctattttattttggatctataggccatgctttcttcatgtttattcccagggcctgggccgtcctctcctatgtgggagaagcacgctggccttttggcctgagcccctctgctctggccaattaaggcactggtggtgagcagagctatgaagggagagacagcctcaggcttctaattcctggacaccacccacttatgtcgtgctcacagagctgcctatcactacccagagtcccagggcctcagaaggaggctcagacatgcagagggaccaggaaaagcacagaggagccaaggtccgactgtgggcatcagtgcattgggctggttgggcaccaggtcaggccatcacgagccctgcccagggaagagcagagaagctgcagagcctgtagtgcccccccaccccccttagacctctgactgtcctgccaccttctctccagaacacaagggcacccagatgagggccagactttctggggcaaggaagaaggcaggaaaaatataaagaagctgattctggacaaagcagggcatcggtgcatgagtctgctggggcacagagctgggtctaccggggacctgccagagagggtgtcagggactgctgaggctgcacagagcagccaggaagcacagaacattcgactgtgaccatctgaaatcaactactcgggagagggctccctcaaagacttaagggcaatcatgccactctttggccagaaccctctgatggctttccagcttactccaagtcaaacccaatgtcctcatgacagtctatgggtgggctccgtgtcacccctccagcccccacacctgccctctctcccactgtccctttgcccccgcctccagccccgtcctgtgaacgcatcaggaaagcccccttcacactccctgctctgaaatcttccacctcagtgccgacgcatggctcccacctcatctctggcaagtcctcgagtgccacccgcttcccttgcaccatgagtccccctggccccgactccggtctgtttctcctgcaccatgcacgttaactgctggtgtgtgatacaattccccgcgtggctctcctcacaggagggaaaagctccacaaaggcagagttttgttttgttttgtctggttgagaacaggtatctctctcctgcctagcacagtgcctggcatgtggttgatacttgaaaaatatttgccaaatgggctgaccccctgaagcagagccctttcagcagacatggagtgcacaggcccagtcccacacaggaattgagaaccactcgggcaagaatgcctcaaggcctggtgggagctaggggtctgtggcccggggagatgctcacagatgcccaggtctgtaactgtgaatattcacactcatgtggctctggtggcccattgtcctgtaggtgcttaatcagggcacaggaaatcaaaagcgtgcccctctgacttgaccaaaagtatgcgctgggtgtcaaagaagtctcgacacatgggaagggagaggagctttgtcactagaatttccccaggtttgtggcttccctcaaccgccctcagcccactgagctcctgtaaagctctggccaggtcccctgaggggaggctggaatccccaagggggtggacctggggagtgggccgggcacacgcagcaggcagcaccacacagcaacacccacggacacacacacacatgtatgcacacgcacacacatgaacacgtgcacacacacacacatgcacgcacacatgcacacacatacgcacacacacaagtacacccaggacatggccatgagatgcgtggggagacagggctgggggccatgacatgcatgtggacgtggccggctctgcgcctgccgaaatggggacagtggagacagtggagacaggcagcacgatagcgtgagtgcacagaggtcaagatgaggtcagaggcagaagagaggcaatgggacgtgatcagcagatgggccctgctcccaggatgcaagatggcacacttcaggagacacaggatgcagagcaggggacagggagggctcagcgagcagggtcccctggtaggggctccgtgcccaggcccacctgggactcgccctcagccgcgcccccaaactgtgtacccagtcacaggtgcccaccctcagcctgggcgtggcggggatggcccctaagacaaggagcttgaggagcatacacatcaccatgcaggcatccagggtgacgcgtcagccacctgaggaagccacgtcacagacatggaaattttgtttcaaggtctgtaaggaattttagggatccaatccaacttgctgattttacagaaggggagagggctcagtcatgcagggagttggcaggaaggaagggcctagaacccagacctcctggccggagagtggggcctcgctgtttatgtgcccgctggccagagagggggcgggcgaggaaggtgttgcgagggggcctggcccaggagtggcaggggcttgggggcagaggtcacagcctcctgtacatcctctccttgggctggatctcacgggggatccctgccatgctgagtcacatcaacaaagaatgaggggaaggagatgagatgatagaaaagggggagaggaaaaagcagagagacccggctccaggaagagcaaactgctcagtccctagaagtggccacagcaggatttgtaaaacaccgtccagttaaactgcactagaccttgggccaggaatctccatgccctctgcttcccaaccactgactgttttacagatggggacactgacaccccaaagagggcccacgccttgcaaagagctaccggaaagtctgcagctgtgtaggggcagtctctagctagaggcctctgactcagctttttctcatacaccacgccctgtggggacgcagttgctgatggcaagggcctgggggccattctgcagggctgcaaaggctaaggcggaggcgatgcccacctgcacaggagcagccatctctctctccttcgcctctgcttccccggaaaggaggaacttgttgctgacaaaccagacctcccaccaatgggaggcagagcgggctttgagggatgacgtattgtgggaaggggttattggtgctgatgcctgtagggcagggctccggctcagtccccatctggtccaggtgacactcaccattcatctgggagggtgacagcgagtagtcgcggtcggtgtgccgcctgtctggcttcaagttgcggctctgtcggccggaaccctccagcatgttcacgatctcgccacggtcaatgctctgcagggctgtgtacagattctccactgtgggcgcagaagagagatgcacgttactccaggccggtgagcgaggatcacatgggctcagaaaatggggccaggatgaagatggagaaaggagataatttttttcagaaggtggaggcaccctcttttattagagtcaaaacaaacttcctctggggagaatactttttacacttcagcagatcttttccaaatgctaacagtgcgcagttattttatttattggtctctgttaccaaaaaaaaaataaattattttatttattggtctcactctgtcacccaggctggagtgcaatggggcaatctcggctcactgtccacctcccaggctcaagcaattctcgttcctcagcctcccgagtagctgggattacaggtgcatgccaccacgccctgctaatttttgtacttttagtagagacaaggttttgccatgttggccaggctggtctcgaactcctgacttcaagtgatctacctgccttggcctcccaaagtgctgggattataggcatgagccaccgtgcccaccacagtggccaatttaaaagtctagaaagactgtttttttattattattttgtaagctaagaggagcactacaagaaaataaggatgagaatgattagattctgtccttttgaaattcttggtccttgccagatgatttgagatgcaaatgtaaacactcaatttccacttagtgtttttgagtctgggaaactggttgaggaggagctgaaaagagaatgaggcaaagctccctccaggttggaggaagctcctgggagaatgagaactggttcagactggggtccagctcacccagactgtgtcctgagaggacaatactcatttgcttgggaaattcaacaggaagacctcaaagatgagtcatacaccctgcacagatgttgtcatctaggagtcctgatgcaatttttatgttattttttttagagtcaggattttgcttgttgcccaggctggagtgcagcagtgcaactgtagctcactcagccttgacctcccaggctcaagtgatcctcctgcctcagcctccagagtagttgggactacaggtgtgtgccaccacacctggctaattttgaaaggactatgttacacagtctgttctcgaactcctaggctcaagccaccctcccaccttggcctcccaaagtgtggggactacaggcatgagccactgtgccaggccttgcaatttttatcttattccaaggatgtgagaaaggctgaggccaagcttctctggtcatgccttctggcaggactgcctggaagacctcctgatgcgagtggtgcgtgagtgtgtgtgagagagacagagacagactgactccagaggccagtgtcatgaatggaatttgaaggaagaactagtttggtggggaggaggtcctaggacaggcttcctcagtgggacggtactgactgtttgcgttttggccttcacggatgacccagaggttcagcaaggccacactctgctccaacagggagttgggattttccactcggatcctgttgatgtcttccacactgaactgcagctcccgggccaactctgcaagcaaagaaccaacagcagatgtgagcctccagctcaccaacagcagggggcctccagcacacaggctgggtgggcactggggcgtggggggacccagtggggagcacagggagctctgaggcagcctccctgtgggtttggtcttccttcttatcaagaaattccttatgaaatgccagcacctatacctttatgtccccagaaaatggaagaatgggaggggtgtttgttaaataggtcctgaatgaatgaatgatcaaatgtcctttcttcctttcgtaacttccaatatgagatgacatgaactctcagcaaggtcagcaacttctgcaaggtcacagagccagcaagtccctgagccaggaggcagccgtacctgccgattctcaccccagcactgcctgggccacgccatgccctactgccaagaaccaatgagaacagaaatggactcctgagcttatgcgtcttcagggagaggctttatttacatttaaaatgaaaatacaagttcccatctaaatgcaaggcaataatgcagactgttagccaaaatcccccattatttttattgttattgctttagaaggaaaatagcattagagtctaatttcaaggatgaagaagactggggagaaagtgatggtgagaatcagaacacgcacatacaacacaaacgtgcacacactcacaacacatacacgtgcatacacacatgcacacacacgccccctgagcagccagcagtcatgattaaaagaaggagccgtgactgaacttctgagtttgtcacacggcctttccacaagtcattgccaaaaggtttctgagtgtgtctaaagtgttctccaggggaagtgaatgaagggagtccactcatataaaagctaacaaaaaataaggaggggaaggggaagccatctcagtgtcaacaagaattgagcaccgggctctggacagaaatacggttataattaagcattcaccaagctgcgcttgggtcctcttctttgttgctcaaagccacacagtgctggatactgaccactcgcacccccattgttcctaaagacagggtttctgacattaggcttctgtttaaggatcccttaagatggttttcagattcccaattccagcaaccactttgaaggcagggatcagcacgagaacgtagcttcttgctctccctgtccatgactccaccctgcactctccaaccaatcaaccacctacacactccagccactccaaagcccttaacagcccgagccctgaactcctccttggggagacggatttgaggtttcctcctccctccttgtttggtggtcctgggattaagcctctttcaccgctgcaaccccgtgtctccgtgtgtcttgacttgccactcacattgggcaatggacctgctgtggttacacagggagaatccagttctagggtctgtggttgggcacagcacattctgagccttcactttatttgcccacctgtctcccttaaaataagatctaccctgatggttggcaggacttctgtgagatccagccacagccacagaccatagcgaaatatgttgagacttgccctttccttccctccttttcaaggtctcctgtaaactcaaaagctgagtctttcttagaaaggaaagtcagacagagatggaggcagggggctcccccttcatgggcagccaatggtgtggcttgggcagcagacccagctcagacaatcacaaatcagataacccacgggtgataaaaggagggttagaaatgcctcattcattgctcattacaggggaagagggtaggtgagatggacaaagtgcttttctgcccccaattccccactcacctgcccagctgagaccgaggtgctctgagataacagccatcttcatctctgcctgctctgtcccactgagagaacctggggagaagcattagatttcatttagtagccagggcaggacacagttgacaggcctgaggacacggcctgtgatggatgtggcttccgtgtgcactggggtgattgtctagactctctgcaagatcaggggaagacccgagtcagctctgcagctgcttttggaactggctgagcgagcggcacctcagcagaaccctcacagggctgcggggagatgagctcacgcccacccttcttgggaagggagcaagcatgcatcatcacacagaggccgtacctggtgtggactcactgagaatgctgtatcgcagggccaggggcgtcggggtccttctcctatcttcggctccacttccctgcagaagaagaaagggtgctttgggttttggactctccccaccttcccagagaaagtgatctgagctcctatgctgcaggggtgtggaaggctgaccccagtcctggtaaacaatcagtccgtttcttcagggacttaacacaaagagtaacacatgggaggagtgggagtgaagggaagctgaagaagcgcacatgcgttattaatcacagtcgtaataacggcaagcccacgtcaccccatcacctgtgaggccctatttaatgttcacggcaacctaagaggtgggtgctgtattactcccatttcatcaatacgtaaactgaggcatagagagacaaagttccttgcccaagatcacccagttaatatgcaatggagctggggttgaacttaaaatgattgtttttctttttggatttctttctgcttgaaagacccgtttctgtactgccttaaggccttaacatcacagccctgtggaaaagcatccgaacatttgcccaaggctgcagaaaaatattctctctctctttttttttaagagccagggtctcactctgtctctgaagctggagtgcagtgcgatggcacgatcatggctccactgcagcctcaaactcccggcctcaagtgatccttctgcctcagcctctcgagtgccaggactacaggtgcatgccaccatgcccagctaatttttcatttttttttttttgtacagacaggatctcactatgttgcccaggctagtcttgaactcctgggctcaagcaatcccttgccccagcctcccaaagcactggggttacaggcatgagcctctgcgcccagcctgaaaatcctcttttgaaaaagaagttggttcaccctcatctcatgcccaaaaagaaaagagagattgagccatggacttatgaatgtaaccttgcttctttcctagtttagcatggaaggctaatgattaaaacaacaacagcagcaaaacaacagcaacgaaaaccacagagacggtctggagacgtatgatccctccaaagtccccagcagaggtggtgactgggatactcttacaggtatcgacaaatgaacatacgtggccaagactcctttgctgagctcaaaaccctgggtgtttgcagtggctgaggacaccaggcttcccttctgtgagggcctagcaccctgggaagataagcaggtagatgaaaaagcggcctgagagaagccgtgcaggggctgggagaccttagcagctctccttggtgtgaacctcagaggcctcgggccagggacaccgaggcagatgcccttagggccccttgtcactttcacacctagggagcccagggtccacagcgtgaatgtgcccatcaccatctgataccaacatttgttcttcctgtcccatgaccagcactgcactgcaaattgcagagagggccagggcatggtctccccgccaggccacaacatgagcatgtggaggagagctcagcacctttgcatgcctcgggggactctaagcttccaccaggaagaagccccttggaagtgctggacctggggtctgtttggggacctcctacagggaagccgtctcgggccaaggctcctcggcaggtgccagctcaccttggcgcaggggggcatggtgatgttcaggtggcagagaatgtgctgggtgtcctcgtacttcatcgccttgcgcagaaacgacagggaccctcccggctctcgactgctgtccctcacctaaactcaatcacacaaaggagaattcaggggcccttttctaggccacccggctgtctggtttagggaattctgcctccccaactttctagacccagaggagaactcagccagagggtgccggcacctttacaggcatggccagacggttctcccgaaatgactggaagtggaagctccgctgctgggcagctttcttcacaggcaccaggttcccagagagttctgcaaacagggacattccttccaacacctgcaggagaggaaaagcagatacagcttgtcagggagagaagggcccagatgtccctccttccaccttcggtccttccctctccaagacacaccctgcctcagcaagaggcatgcgggtgtgtgctgagaaatccactgtttgttttgggaaaggctttatttccaaaattgtgatcaatgaggcatgcttcccgacttcaacagattttgtaatatgtagggatcttcaaatatccctgagatgttgatgggaattgctatcaagtattccaaaacttcacttgaatatcataacatagcttctgaaaacaacaacaacaacaacaaaccctggttctgggctgggcatggtggctcacgcctgtaatccctccactttagaaggccaaagtgggaagattgcttaagttcaggagtttgagaccagcctgggcaacataggagatcctcatctttacaaatttttttaaaaaaactagccaggtgtggtggcatgtgcctgtagtcccagctacttgggatgctgaggcaggaggatcactggaggccaggagtttaaggctgcagtgggctatgatgtcacaactgcactccagcctgggcaacagactgagatcctgtttctaaaaataaaaccaaggttctgtttttatgtctgtccaaagatgctttgttcatgacaagagctggaaagcacttgctctgttttaatctcactcattgttatgggtgagctttcaactgagaagttatcactaactcatttgacagttgaaaaaattgaggctgaaagagaaaaaccggtttgcctcgttagtgcctaagacaggattagaaccaaggttatagtcctgcacttgttctctggggccctcagccttccccaggaaaactcagtgcagattctgaggattagatcactgctggcttactacacatcttaacccaagtgggtctcttaggatcggtaactggttcagacctagcccccatgccttcactcttcacattatctgtcgagccctttcctctgcctcctcacctgggtgctactgaaaccctagcacagcaggttataatgtagactctggggccagagatgacctggataaatcccatctccaccactcacttagctgtgtgaccattggcaagttacttaacctctcagcctcagtttcttaatacacaaataagggataataaaggtacccataaatatgagaattaaatgagaatatgcaagaaaagcacttttagttatttatttaatagagatggtgtctcactacgttgtccagactggtctcaaactcctgggctcaaagcgatcctcctgcctcagccttccaaagtgttgggattataggcgtgagcctctgagcctggccagcacttttatttgtttgttttttgttttgtttcctgcccccaccaccatactcagctggctagcacttttttttttttttttaaacagagtcttgctctgtcacccaggctggagggcaacagtgcgatctcggctcactgcaacctctgcctcccgggttcaagtgattctcctatctcagccacccgagtagctgggattacaggcacgtgccatcatgcccggctaatttttgtatttttagtagagacagggtttcaccatgttggccaggctggtctcgaactcctgacctcaggtgatctgcccgccttggcctttcaaagtgttgagatgaaaggcgtgagccactgcgcccggcatggccagcacttttaatagtccctggtgcacaagaccttcggcaaatgccaactcttttcatagatcactggaccaaaagcctgcagcctcctctgagatgtgcatggtggcatctctctcctttcctgaagcttctctaagatgcttctcaagaggggtctcaaagacagacagctgtggagcccctcgtctacagagggaggactgcctgcctgcacctggtaatggtgttctggagaaaacggcaggacggtttgtcccagaggcggtgcagggcccagccctgttacctctatgtccctgctccgggccacctccacgaagttctcatgctgctccagggtcttgtccactttatcatctgtcatgcagtagcagcgcaggcgcccctctcgggggtcattcatcttggcaaagatgacgaatttggccatgtagggcactgcagtgagctctttgtacagcagggtggcaaagttcacagcctcagcagtccgaggacagtccgacagccaaaacctaaaaagtagggcgagttatgtgttcccaagtgcccaacagagagcatcctttccatccagacgggagcagcccgtgagccataccatggctactattgccacacctgtggtcacggaggcttccacatggaggggacagtgagggagcctcagcctcaggcctggacggcagcatagagcctgaggacggcccacacaatactgggctgggctggcctcgtctcacctggcagagacattggtggtgaagttggcgcactcgttggcatatacaagtttggtggttcctgttatgtcttcccactgggcttggtctgttcctcctgtaacagcggcagaaatggggctggggacagtcttcaggatgtaagcatggagcttactaaaatgctaaggccgtggtgtgcaaggtgagactgggtgaagctcactttgtctgcagccctgggcaccctaccctcaccccgctgctcttcctcctagcaacctgcatgcccctcctcctagggcttggagagttcttccccaggggcatggactttttttttttttttttttttttttttttttttttttgagatggcgtttcatgcttgttgcccaggctgcagtgtagtggaatgatctcggctcactgcaacctccacctcccaggttcaagcaattctcctgcctcagcctctggagtagctgggcttacaggtgcatgccaccatgcctggctaagttttgtatttttagtagagacggggtttctccatgtctcgaactcttgacctcaggcgatccacccgccttggcatcccaaagtgctgggattacaggcgtgagtcaccacatgggcatggacttttatgcagatacatcatccttccatctcttggaagagcacctcactcccggggaagtcaacaaaaactaaggggattgctggcctcgccttctcgagtcacccccctactgtgttccagacgcactgcagcagccgagaacagaagcgaggcaggggcccctctcaccaatgacgctgcaaagcaggcgcaggctggtggtgtctccctccccgctgtccctcgggttgtcggtccaggaaggaggtagtgggatccgaagcccaatggggcggtggaacttccggcgccggggctccacggtgacaatggggctgaatgtggcctggttgcccaggagcttagtgacaagctcatccgggacaggctgggcctgtgaaatgacagaggcaggacactcaggcccaagcaggagaggggctaatcagacgggaggcagctccatgcctggtgagagtggccgtcagtgcacggggtcccgccctgctgttggaccacagaaccgacacggtggagcttgccttcctgagccctttctccccttctcctctgcttcttactcccagggctggtgcatctttgctagcaccacagtcaactcccggaggtcatgcggttcctgcatgctgcacagactgggccgtgcagcttgatgggttaccaggggttctgcaacttatcagggagcttccacctcaccccttcccacttaactctcctttgagctttaaactcagatctccactgtggcatttcaaagcaccagacaaaagtgtggggatgtcctggggaagagggtggccttcccggaggcctggagttcagtccacccccaggacctggcggggaggagggctgtcacctgcagagccagcttcactctcttggtgacggcattctccgggaacgttgcctgtaccaggggcaccagcttgctcttcagggagcccccttcgggaccgatggtgtcgtagtcctggcagagccgtgacatgatcacgaagtacagcgggaagtcggtggtgatgattcggcacaccctcttcttctctagctcctccaggctccccagctctggaatcacacacacaggccaccaccccggtcacatcaggcacaggttcaggacttccaggggccccagagtctccttgtccccaagacccagtgcacacaccctccccaggtgccgggcggcatagtggccagaagaagtggccagaagaagtgcccaggcccagaggcccagcagagcagatgcggctgcaggcagccgctgagcatcctctcacacatcctggggacccagggcttgtccacaccaggccattctcagcctcttggggcttcccaaacttcaggtggccctcaaagaccacctttaaggtgcaactcaaacccctcttccgcaaggaggggacccagccctgggatcccccgcccctaccttcgtccatcccgttgaggatctgatccaggtagctctctccatagcggctcctgtgctccttccacacggagccgttttcgctcctcagaaccacgagctcgcggtctccacggccatgggaggcaaagtgcgggatctccacgattacagggctgaggcaaggacacagtggtggtggggaggtgctcatacaaggcaggcagggcacagggagggatggggctgccggctcccacccagatggataaggcacttccgcagccacgtggaggccccacctgcaggcaggtctctaagtggaccagacccatggggaggttccccagggcttcccatggccccgcttgctccccgccaggcctgcagtgacagtgagggcaggaccagtctcatttcatgcgggctctgctcctacgacctaaagatcctgtccttgcacctgattccaaaaatccacctgacatccctagacgggtgacctcatctatcaactggccataatgacatttccttcagagggacactttgaggacaaagaaacgtcaacgagaaaacttgctgctttgcaaatggtggtgaccgctctgaggggccaggagggcggacagaggtagaaggcagggcctcctggtcaggcctgtccccacaacacacccatggtgcctgaggggcagcaaagctccaggaggagcccaggctgcttcaagggagtggagcacaggcctctggagccgggtacttccctcgtcctcaggggaaacggccagggaggccgtcttactgggaactctcagtgcataaaaggtcagaccctcaggcttcagagtggccttgtctctagtgtcacacaatatttaagagttgtttttttggttttgctttttattttttacaacgacggggtcttgctatgttttccaggctggtctcgaactcctggcctcaagcgatgctctcacctcagcctcccaaagcactgagattacaggcgtgagctatcgtgcccgacctgagatctgagagttgtaagccctctcagggctatggacaccttcgtgtgtcaggaaaagtcagggaaaggggaggggcacccagttctgtttccccatcaggacagatggaaatggcgtggcctccgtggcacagggacaggggagaacacgggctgcccgcgcaagctcacctcaggaactgtgcccccgtgggccccagtgctatgatcctgctggccaggccctcctcctcggccagtgggggcggcgtgctgagcttctggggcttgaccaggcggcaggtgatgcgggtgggcgctgcgcacgtccgtggcgggatcaccactcgcaggccgttgtggcgacttcctctcatggaaccaccccgggcgtcaaccatgaagctcaccagaaacctaggagtggggcagatgcacgttgggcttctgcatcccctctcggagatggagacaggagtccccgagccctgcgcccgccactcaccctgtatgcaccgggctggccaccgggctgatgttgtctgaggtctcggtggccgggctgctggggatgagggagtcctcatcatactctttagatgcctgaggagagagaaagggtcctcctgtcccacctcctcccgggccagctggatgccgtgccagggcgtggaggcttggaagaaccttgccgctagaaaccaggtgccacgtggagaaagtgctcccacgggaccccaccgccctgtcagacaaggccgtcctgaggtctaaaaggaagcacgagcttcctcccacctccatgcctctccttggctcaagaccctgggacagagccttggaatgggtggagccagtcctcactgttcagtctggctccaggccccaggcccgctgcacctgctgcagacccgccccccttctctccagctctgcccatggggagccctgccctcagcaggccaacttcctctagggtgggcactgcatcccagcaccgtgaccgcctcgccagttagctgtgggcggactacctgccctgtggacatttggagcccatgaggtgaacacaacagactcctgcccttgtggggcttcctgcctcctcacctgtgcaacgggaacttgccttagggtaacgctgcaactacagggatgccaggctgccctggcacagccagcagcacctgaacctagccttgctgctctctagatcttcacatttgcttttcccccggtccagaacgtccttgtccatcgcccttgttgatctaatcctctccactccccacatctcacctcctccacagatgctcccagccaccttggggctggttagggcctccctgctctgcactctgtgagcactcacaccacacagtggagcactcccccgctctccctcctggttctgtgctaactgggttcatgcgtccgagtccactctttctggttgggccccggctcccaggaggcaggtgtccagccctcctgcctgagcctgtccggggtgcacagcaggaatccagtaaacatctgctggctggagttcctaccctaggccaagagttgaagacagtgggctggtcaaggacccactggtttctcactgctgctgtcctgggctgcatccaaggactgcgccaccacaggaaagggccccatctgaccatctcttccagacgccgcccacccagcgccaccaatgttgcaccattatgaggcgtccaagcgtggaatgccagttggacagtgagtggcatgtgagctattagtgcctattgtgctacgtacaggccacccctcaacaatcactgtcccagggttttcatgccctccatgtggggaaaccacagagaaggagcttctcacctgctcctgctcttctgacctgatcaccactgtctcaggcatggcacagggaatcctggggatggctggagattccaccctgcgtgccaagaacaccagaacatcacagggctgatccacatgtgcacacagctcctcttcctcttgcctccaagcctctccctccggctttccactccagagcctgactgcgcttcacaacctggtggaaggaccgcctcctcctccatgaagtcctccccaatgactccaacctgcacttgtcgcccctttctctacctttagaacctgttgacagaatcctcgctctggctaacaatatatctttctgtgttgctacatgaccacttggtgtgcatttcgatcccaccaaatgagtccgtaagttgcttacggtcagggttacagctctgtatttctttctaacagatgtccagcaaattcaaatggagtaaatggcccagtggtttcactccctgcttgttcatgggacacttccatcttttcagaaaacacctagggctcagtgtttctacaaagtcgttgatattagattgctttgcaaaatgtccctgtgtacactgtgccccacagtgagataactcacagcagtcacagggggaaatgagaaatgtggtccaggcaggcagacccggatctcccctggcttgtacctaacatacctcaggggcagaggtatacagtcaagagttcgagcttagcctggcaatagtttctaatgtgaatcttcctcaacaattttttttttttgagatggagtttcgctcttgttgcccaggctggagtgcagtggcgcgatcttggctcactacaacctccgcctcccgggttcaagcaattctcctgcctcagcctcccgagtagctgggactacagatgcgtgctgccacgctcagctattttttttgtatttttagtagggacagggtttcaccatgttggtcaggctggtcacgaactcctgacctcaggtgatcctcctgcctcagtctcccaaagtactgggattacaggtgtgagccaccgcacccggccatcttcttcaacttttggatgagaagttgagtgtggataagagggagagggggtgtggatataaggctgtgaatgaggggagcctgggagaggatgggagcctgggtgggagaggaggggagcctggaagaggagcagagaggcgtccaggcagcacggtgtgagggaggcctccgcctgccctagtggctagggtgcagagctagctcatcctaaggtgcaaaccgtctctctctgcgggcagcgagcccagcgcctggcctgctgtgtccttcctccctctggaatccctgctctgagccacagggttgcatctcggcacccccggggaccctcccgggagcactgctcacacttggtctagcttcggcacaaaatccagcagctccttctcttcatcaacatccctggaatcccgcctctcagccttgaagctgatgagttcttcccctgaaacagcaagagctcaagtgagcgacggggtagaggaagaagagtccctctttttttaaaaaagctctgttcccgctccgcctctgggggcttgctcctgaggagtggggaaggtcttgatgctgcaaggagactgggagcaatgtctttgcccagtcctggtcctccagctctgggatagagagcagggcagccagctcctgacatcttagatgcctgaggctttgcaggaggccaaagacacagccagaaagaactttgttcgcttagttccaattcaaaacagcccttttagctgtgcaatggcaccaaagaaggaactgctactgctcttttccactccacaccaacagaagaataaattacagtggaactggacccactcatttcaaagggctggagaattttttgtaacaatggcagccaaaacctcattacttccaaagcctatcacaaagagtttcaaactacgggtcaatcggctgcctacacctctgactgcctctttgtttctctctcctagcttcaactggagctggagccccggccctcgaccttgaggggtcattcattgccacccaggagtgagcaccatggcttgtgatctggagctgatggaatggaagaacaacagctcatgcggttatgatcataaacacggtggcatgggcacagacacaaagatggacaggcaggaggtgcccgccaggcatgggtctcatgggtgtgaattccctggtttagctgagctcctggctccagcttattagctgtcagaggaagatggaaagcaggaatggattagtgagcatcagggttgcttagggtgaaatgcactctagtgagaaaagaccacagtaaacagaaagcatttcatacccattatagttatatgagcagttcctggaaagcaaaggagagcagaattgaaagaaggaccacattgaaggcagttaaagcgagaggcatatattatccaaaggagcaccagaagctctgcttctctagttgacaaagttatacaaccatgaaattatccagatggaagggaccactgagctgatccagcccaccccactattcaacatcctcagagttgaggatcctactactcaacatccccatctaattagtgatgaaataaggtttgctgggggtaggaaaaatactagaagcattctgtagttcatacaagctgatactatagtaatttctttctttttcttttagagacagggtcttgctctgtcaccctggctggagtgcagtggggtgattacagctcactgcagcctcaagctcctggactcaagcaatcctcccacctcagcctctggagtagctgggactacagatgtgcaccaccacaccctgctaatttttagttctaattttttggagagacgggggtctccctatattgcccaggctggtcttgaactcctagcctcaagcaatcctccaacctcggctgcccaaagttctgggattacaggcatgaacccaggcacccagccagactatagtaatttcataatcacagaaataacccaaaacctattgacccactatgtggtcagaagtgcagcttaaaaggcatgctcacagattttgaataatccacttagtattcgttcaaagcacaaagaaagaaccaggcagaattttattacagttcctcatggtgcggagacttgatctcagtagaaccacgctccgatttcatacacatccataatctatgcaaacatacatgtgtttttgaaacttcatgggattttaaatttagtcaatgttccctcacctaagtattaatagagcagtatttttgatagtagacaacagttataaaaaccaggtctccccagtttcagtgtccatctatagtgcttgggcgtgttgtaaggggacaaagccggcaggtggcaggaagcccccttggagggtgcccggagcccctctgtccccaccagcctgagctctttaccccaacgttaccttcatcttccgagacatccaggatctcatcaactgtctcagggaaactcattcgatgcttatcactgactaactaaaacgagaaaaagcagataattcaacccaaactagagccgcacacattttttaccagcccagcggttccctggtcatgcctgtggggtttcccacaaatgaagaaaaacagacggaggaggcgctcagcctggaagctgccgggcaggaaccacggggacgggacccgggaaaactggcttcccatctccccaaaccccatccactccactgctgcccggaaagctggtcccgcccctagtcctcgggccgctaggtggcagcacagccccgctggaaggaggacaagctcccacccgtcgggcgcggcgcctccgacccgcgtcccggagccccagaacgcaccccacttccagagtaaccccaggcacgcctgtgcgccaggctgagtgtgtctggggtgggtgcgggggagaggcagacataccacgaaactggtttcatccgtgacgaccttgagcacgtcggtgacagaaatgtagcccaagcgcttggctatggccagaggtgtggttccatcctggggaaagagcagcccgggtgcagtcagacaggggatggagtctaggaggcggggctggctccctagacacagatcgagttcaccttctagttgttcaggaggacctgagtggacagacgtcaccgtggggcccagaaagagatccctgcacgtgtgtgtgcctagatgtgtgttagcagcagcacccacagagacgggtgtgggaggagggagggcagcggtgctttcgatctgcagcgtcaagtgtggggccttgcaacccagcagaggaaatctcccaaggagaagtcaggctctgctaagtgggaacccactgggaaggaggtcaggaagttgccagatgcaattttaggaagatgaggacagaggaaggctgcttgctgctcccaaagtctgttcttgggtgtcagtgatggggtattaaaatagttgaattaatccatatacttcaatgaactctaatcagaatactcggaaatcacaaatcaccagaaatacagcaagggcatattttctactttgattcaaagaggaagagctacgtgatcataaatggatactgaggcttgatttttcttttgacttctctacttctaggatgtgccttgggctccgttcagattcaagcccagctgcagttgcaatttctgcaaccccatctacaatcgagtccacttttgtgtgtgtgtgtgagacagagttcactctgtcacccaagctggagtgcagtggcgtgatctaggctcactgtaacctctgcctcctggagtcaagtggttcttgtgcctcagcctcccgagtagctgggactacaggtgcctgtcacctcactcagctaatttttttttttgtatttttagtagagacagggttttgccctggagtgttggccaggctggtctcgaactcctgacctcaagtgatccacctgccttggcttcccaaggtgctgggattacaggcatgagccactgcacccagccaagggtccacattatttcagagatagaagcagacacggagataatttcacagaacttccacatggtcagatgaagaagctcacaccgaacgatgattgctgatgtcactaaagataaccttgagccctgaaagatcaggaaccacccaggacatttaattatgttcagttgtaccatactgaaaacagtttcacatattttagaatgggtttcaacaagtatttatatatgtggtatgtatgtgtgtgtgtgcatatatatatatgtatatgtgtgtgtgtgtgtgtgtgtgtatatatatatatatatatatatatatattttttttttttttttaagacacaaggtcttgctctgtcttccaggctggatgtcaagtgggcaactggaaaatggacactgaactgcagtggcgcaatcacagctcactgcagccttgacctcccggactcaggctatcctcccacttcagcctcccaattagctgggactacagctaatacgtatcaccacacccacataattaaaaaaatttttttttgtagattcaggcactcactatgttgcccacgctggtcttgaactcctgccctcaagcaatcctcccaccttagcctcccaaagtgctgtgattacaggtgtaagccactgcactcacacttaagaatgttttaataaacataaaagaggagggtaaatggtgcttaaaaggaaaacgatcaattcaccagaaagaggaactgatcacagcaccccatccccagggtacccaaggtagctgtggctttagggtgctgcggccccgtccaggccctagacacgtgcattaacctctacggttaggggagttcacacagggctgctgccatggggagcagttttctaaactcaggagagagagtgtactcaccgagctgacctcgtttggggaagcaccgtttttcagaagcagagtcacgatgtctgtgtgtccctgctgggctgcctggtgcagggggctgtatcctagctgcaaagtgagcagacatttaggcagggttagccagccactagacagagacctgcctacacatgatagtgcctgcccatcttcgaagtgggacattaatgaaatgcattttccccctttcttccttcagggtccatggtcaaaaccctagtgctcccagagcagctctggctttaccctgatgtggcatggagaagggtcagtgcaggagtcggggctggggcacccctgtaccttggtcttggcattgacatctgcctggtgctgcagcagaaacttcaccagcttgatgtttccatagtgactggccacatggaggggagtgtagcccatctgaaaagcagatgagaaggagtgaccggagctgtcctgagctgggcatcacatgaaatccttcccaaagcagctgattcaaagagagaacggacagggagccccttgaaggctgacattgacaagctgaatggctgctgctgggcagagaccaccaggctgagatgcttgtgggagacccaaggggagacgtcaagcgggcaactggaaaatggacactgaaccgcgagaagagggctatgctggggtcgtcagtgcatgggagatctgagagctttggaggtgagtgaggtcccccagaataaagtggagggtgaaaagtggggccgaaggagtgaggcagaggcagaaaagaggagggaaaccttgagagaccagcatcacagaatcccaggggagctatttcaagaaggaagaaacagccttcaggcctgggaagggtgctgagatgagggcagatggggatgtggagtcatggtcactccaatgacaacaggttttttccattagaaagctgaaatcccattgaaaaacccccaaaaggctgtccaagtgactgtggtgtaatggaatttatgagaactggtcattgcttattgaaatgcaagggcttgggacattcgctcatgtgagtctgggctgttcaaggagtctgtcctgctgaattttgtggtaatgccttcctgaattttgggccgacaggccaaggccctctgagctccttggtcccaagtgtcccgggaagctggtgccagattccagagaccacccaagcacagatcctccccataatgggatggcttttggatcctcaaggccattctaacccacaggacagggtctctctgtgcaggaccccaaaagactaaacggggcccgcaagtgaagcctcaaagatccagaacattcgtggattttaagcagattgctgtggaagctgcaggcagttggagacaaaacacaatttccagacttttctcagggtgacttcagcataacattgttgccggcatttctgtgctactctggagggggcgggagctcctggtactgtcactgtcccttccttttaatatggttcccttgtggggaaaagaaacaaaatgtggcttcttccatgaagcccacctcctcgcaccaactgaaaacaccctctctgcactctgtgctcccagctcctctcttaagagtaaatatcaaattatgctcttccttcctgtccctagcaatcacctccacaccaaactgcagacacctcgacggcagattccattcacatagctccttgcacacaccagaagttcaaagaaagttgaactggatttaaccaagtgctggaagaaaaggagctaagcttttgtgtggatctggggaaacttgacattttgacatgctaactactcatgttagacaggtcttagagtcatgattaaacattcgccccactttctcactgcagaggctcaaaggtctagcaaactttaaaaaaatccccaatgggaaagtcaggtaattaggagtagtgttttcaaactccactgccagccctaggaagtggcagagaagaatgtcccactgggtctttggggtttcaaagctctgtggaagattcaattctgaagtgtgagcaaggagtccacacagactgaagttccggctgcctgccttacccgggtggtggcgtccaccatgacgccgtgtttgatcagcacatctgccactggaacgtggccttcttgtgctaccagatggaggggagtgagtccgctctgcaaagaaaaagacgttcatcaccttctatcaagtaaagaattccaggccacaagtaaagagctctgaggtctgggagctgaagctaactttgcagtcaccaactagttatttggctccaggcaaagctcttcctgttctgggccccaatgtccttatctaaaaagtaaggtggttacactagaccaggggttggcaacttttgctgttaagggccagatcatcaatatttttggccatgtctctatatgactaacatttaaatgaatgggcatggctgtgtttcaataaaactttatttacacaaacaagtggtggaccagatttggcccacgggcccatagtttgctgacttctgatctagatgaactttatggcactttcccatcgttggtgctttatggacttcccagtaaagaatgccccatttccatggtgaatttcagagccctgtagccttggtttcctaatctagacaataggggttatcatggatccatctcaggggcaaggtgaggagcgctggagaaagcacaggtgaagcacattgagaggcacacagtgctgtttaaatggctgggcgcggcggctcatgcctgtcatcccagcactttggaaggccgaggcaggtggatcacctgaggtcaggagttcgagaccagcctggccaacatggtgagacctccatctttactaaaaatacaaaaataagcagggcgtggtggctcatgcctgtaatcccagctacttgggtggctgaggcaggagaatcacttgaacctgggaggcagaggttgcagtgagccaagattgcactactgcacttcagcctaggtgacagagcaagactccatcttaaataaataaataaataatgtaccatactgttatcactgcacagccagtgctggcacggtcaagagggcagagcatcccgccaggattgaacggaccatattcttgcaggtggcatcacagcttcgtcaggaaggcagtaaggtatcagagatgttgtttgatatgtgggcacccacatgaaaatgtcagaaaagtcttctctcccctggactttgcctcaatacactttgctagcgtgggaccaacaaaacggatttctctgcaggcacagaccgtgtcccctctacaggactccacttgccctcctctgccttctgcacaccccgcaggctgcccagaggcttgtgggcagtcatgatgccccaccacacactgctgcagccaaagcaggtgggcccctcctgcaggcaggcgggggtggctccaatgagaacagccctcggttgaggagtgactgtgtcagcctctcaggcgggcgctctgcctcattcttgagctaacaccaataatctgcctcgtgagggcggcgtgcggatgacagagtgggtttccagtcaccttacggtctccttgcaaagctcacattaagtggggcagtgaaggaacccagaatgccatgagatataatgaatataatggtcctaccagaatggttcgctcattgggggtcaattgttcaaatttgtaaaaaatgtgccagattttgtacaaaatgtgccagattttgtacaaaatctataggtttttaagaaatcttaagttgccctgaaaatgcttgcctttctgaatgtgtgctatgtgaatttatcatcaaagaagtggttcttcacattgcatggttccacgtatatgaaatgtccagaacaggcaaattcctagagactgaaagatttgcagttgtgagggaccgggggctctgggggaaatgagaagtgactgctaacgggtacgaggtttcctttcggagtgatgaaagtgttctagagttagatcataggctgctgaattctgtaaaaatactaaaaaacattgaattgtagagtttgaaagggtgacttctaggtgaattatatttcgataaaactgttatttaaaaaagaagtgatttttagtctttttttttgggtcacacattcctttgagaagctgagaaacattatgaatgcttcacccagaaaactgctcacgcgcgcttcctccccagatgtgtgcgcaattttagaaggctttatcctcacacacctattgttgctggagtgagaactcctagtgtataggtcagtgtttttaaaaatatctttcccccacggaacatagaatatttagtcccaaatgacagaatgcactcctgaaggtaggcaccggcctatatttgggaaagtttattatggattttaatattgatctttctgcagatccttaggtcaatctgtttagaaagatcggcaaaggctttggcatcagaaaggctcagaatcctgccaccttgggaataagcaacctttctgactctgtttattcatttataaaatgaaggtgaaatgtacgcagggctgttccaaggattacacacacacacccctaactcagaacctgggcacacatagatgctcaatatgaagacaccacacgttgttatccagcactccagggcagatccgaagacaccatgcctaccttgttccccaggttgccattggcttgtttcgagagcagcagagccaccatctctgcgtggccctcctgggcggccaggtgaaggggcgtcacaccttgcaccgactcggcgtttgctgagcccccatactgcagcagactacgggccacctccacctggttctgcttggcagcgatgtgcaaaggggtgtagccattctgaaacagaagaagccgcccagagcctggttacaggaatgctgagctgacaatatcaacacacaagcaggggctgagtctggttcttggccggctggacacccagtgagcagggctggcatcacccaggagcaatttaggtaaacaaacaaacaaacaaaatccatttgatttggagacagctcctcaggcttgcatagcctctatatgtccatcttttttcaccatctgttttctgttatgctttgacaaactgctggacaggaagagaataacaggaaggctgggtaaggaaatgaaagattctcatttcttgcttcctgcaataagagccaaaaaccccaaatatttcataaagaaaaagaaacatcagccccttttctttcccagtgcaactgggccaagtgctgccctctgggccttgccggcattaggcagggtggtttaagggacatgcacctggcaagggacttgaggatgtgggacagtcctcactccactgttaactacctgtgtgacccagggcaagatgttccatgacctagacttccttctgtatcttttaagtcatgaaaagtggataatagcatctatcttgttcatttctcgaagttgttaggtggatcaaacgtgatactatacgtgaaggtatgttccaaaattaagatataaaaagttggcagggcacagtgttcatgcctgtattcccaacactttgggaggctgaggtgtgaggatcacttgaggccaggagtttgagaccagcctgggcaacatagctagaccctatctctacaaaaaaagtgaaaaattaactgggcatggtggtgcatgctgtagctactcaggaagctgaggtgggaagatggcttgagctaaggagttggaggctgcagtgagctctgatcgtaccactgcactatggcctggagcagagtaagaccctgtctctacacataaaaattttaaaaagtaatgcacctgtgtgtcatggttttgcagtgcactggtttgcaagacattataattgcacaatgagatgaagaagcttgcctcaaaagtaaatcaatgatgtcactgtgcactgtttattcagccaatttttgtttttattattattattgatagcaagactgtctcagtgaaggaagcagcgcatgggtttacattctggagcacactccttatctccctgcaggcaagagacagttcccaggtgggcacctttgctcatcactgccgaaaaccactttcacctgcattttttttgcgcttcattaaaaccacataaggtcactagggcaggcatttttattatcctattgtgtggagaaagaggccaattctctgtaaggttaagcaccttatctaatgtcacgtagtaagcagaacaacagataacccaaccttgaacttctgattgcacagcccaggtaattccagctagaacagtggttctcaaactctgatgtgtacacaaatcccttgggaccttgttaaaatgcagtgtctgattcagaggcgctagggagggcccgagattgtgcatttctagcaagcccccagatgatgctgacaatgctagtccagggatcacactttcagtagcaaggccctagggcactcagggttaagggcaatgccaggctggaggacgtcctggacatgcgcccacccaggcccatagcagatggctgcccaacgtgggatctgtctcagggcacgagatttccccacctcggccagcattcctctggctgaggactgagttctccctgccagccactctcttactgtggaaaccaacatttctgattctgccaggatcactggtcaggaagaggaaagggaaagaaaggggctggccaaggcagtcaaagccctgggtacagggaaagctcagcaaggtgggcccataggtggcttttgtggtgaaacgaaaagttgagacttacccaaggaattgaattaaattgaaaaatcattttctttgaagaatgacatgagataatcctttctagtattcttcctttttaatttgattatgttatgagaaaacattaaattgttcttcgtaggttgtgttcatgtaacaagatcggcatttggattataataagtttaattaaacaacatgatttttgcactgtattaaaagagagcaaaggaatggggtgcgatgccgcagatccagcctgagatgcagggtcggctcaaaacagagctaagcctccccacgattagacacggagcaccagtcagcgctggcccagagaagattttcactatgtaaatgaaaaataaaaccctaagccccacacagatcccatctaggccaaagagatcccagaaaaaccttaaaaactgaattcccagccacgaaggaagggaggttggacacgccttgctatacccactccctttcggagtttaggcgcaactgaccggcattcatgttaaaagagatcataagactaaccaaagggactctttgtgacaagacaccaaattatcaacaggacccaaggccacagtaggcaagggctgagtcacatgccccctggaggtcactcggcccaggaccctggtgaacagacccttctctcaacttcatgcttttctgctgattccaaacttttagataaagctttactcctttaaccaattgcaaattaaagaatctcggaatctgcctataacctctgggactttctaggtatttttgtcaatatataccttccatgtattgatttacgtctttgcctgtaactcctgcctctctaaatataaaaaaccaaactgtaagccgcctcagacacactttctcaggacctcttgatgctgtgttgcccagggccatggttatcacgttggctcagagtaaacctccaaaagactttatggagtttggtttttccattaataactacatgagagcaatgattattaggccatcttttttttttttagacagagtctcgctctcttgcccaggctggagtgcagtggtgagaccttggctcgccgcaatctctgcctcccgggttcaagcgattctcctgcctcagcctcccaagtagctgggattacaggtgcacgctgccatgcccggctaatttttgtatttttagtagagacggggtttcaccatgttggccaggatggtcttgaactcctgacctcaagcaatctgcctgtctcggcctcccaaagtgctgggattacaggcttgagccaccgtgcccggccctattaggccatcttttaatgtacaagggtccatcacttgagcaatctgcagtgtgttcatggatgtatcctcaggaatcccaggccacctgggaagcagcgatgtccacactggcaaggccagccccctgtcctgcccaagggtaggcctgccctggacatggctcaggctaccaggtaaacctctggttaaaattgagatacaagtgccactgtgactctcagaacacggactgcccctctgagcttcccctaaaccagaactaaaatgaacaaatgaacttctgcaggtgacaaggacaaggacaactaggctggaaagtcacggagaggggagggaggaatgtgtgcccgcaaaaggctcttctttcccaaggaaatgagctcatcctaaggaatgcacacggagggagctctgcccaaatgttcaaacaacattagcatcaaaattagaaaggggagggtttggtttgggtgcagagagatttgcatgtgaaattctacaaaattgccagactactttggaaactattttttgccatggaaacaaagcccatctgtacagggtttgtgcttggatttagttatctttaaatataatgaacctggctcccgttccttttatataagtaggggagtgaggaggaggggagtccaggtttttatttttagaggcaggagtaagtcgacatcgcagcggggccgtgtgctccctctgcacagcgacgtgggactcactgcagcagggacaggaggagacagctgtcgggagccggcgtctgtagaagagcgatgctgcaagatggggacacgtgtctgtccagggagggagaacgcgccgaagccctgcactggcactgacgctccctgcctgggctgcggaggccctaagccagcaggtgttggctggagtcacatggggtcccaccccgaggctccttctctgcagcacttggatgcctgccacatgacggatctcccataaattatcctgtttcccgtgcgcctggctgccccatagagtgcgggtactgcgtgtggcttttgtcttcctggccccgctccctctcctctccccttctccccgctggccaccagtcccgcggtgcctatccctacacagcctcgccttcccacagcaggcagcctgttcccaaaaatggtccttccagctttatccttgtactacccaaccccgtggggtcttccagaagcaacccatctgctccctcctctgattccctcaagggtcacggaacctgctgctctgagcagctcgcctccgaagctggtgtgaggctgggccaatgtgtctcacattcaggtgagcctccctacaaaaatgccactatctaaaagtctgatctcagagacaaatgaatttggagatgatcattctcattttaaagaggtctcttgtttccaggttccagcaagctcgccagcagccctgaggatttctcaaagtacggtcgctgtggccccagccttggaaccatgcagagagtaggttaaaaatgaggcttccaggccacactgcacagtcccacggagtcagaatctagcaatgctagaaacgggctcaccactccccagggatttttatccacactgacctctgacagtcagtttacaaaacccagctgacgtgcaactgcttggggacacatttgttgtataaaacaagttccgcctctgcgaggtaacccctggctgggaattgttacccacttcccatcccactcctgggccctgaatagcgtgattacagggcaggtaacatgtgggaaagtgaggcgtgatttctgaggtaaaaatagcaacagaacgcaaaacccttgggctgctgtggaaacccccctccctgagggactggaaggtagcaggtgacctgctctccaggggcagctggggagaggggcgggccttacccaggcagggctgtgcggggagccgccccggggaagcagcagcttgacgatgtccaggttgttgtgatggacggccacgtgcaggggggtcaggccattctgcaggggacaaagacaaaagaggccggctgtcactcccacggactttctcccaggactccctttaggcatgggagcacctattttatacagtaaaatcctgtttaaaatctttcccaggccagtcttaacttggagtcatgacagaatgtcatcggcaggacccagagccctgtgggaacaggggggaacgtgggcagtgagatcaatacacttgcccggagaaggccatcgggtctttccaaaaggataaggcctttgacagaaaggccagtctttccaaaggccattctctctcgatggctacccatggaaatataaacaggccgggtgcagtggctcacacctgtaatcccagagctatgggaggctgaagagggaagatcacctgagcccagagttcgagaccagcctgggcaacatagtgagaccctgtctctataattgtttttttaagttagccgggcacggtggcaactgcttgtagtcccagctactcaggagactgacactcgaggatggcttgagcccaggagtcaaaattgtagtgagttgtgatggcaccactgcactccagcctgggcaacagagcgagaccctgtctcaaagaaaaaaaagatgaacaacacaggcaagagatggaatctgcaagtgctgatgtccatcctctgtccttgcctctaacctgagagctgcaggggagggcagggttcaaactcacttttccggcagcattcgggtgtgcgtcccgctccagcagcagctctgccacccgcaccttcccgtacttggccgccacgtgcagaggggtaaatcctttctgaggagaaacaggctgtcaggaccttggggccccagggctgtcctccctggagaaagggcccacagcaaaggaggctgcacctccgctggcatggagaggccaatgaaagcaaaggcacagccatttttgagccctctgggaggccgaagacctcaggacttggcaggcatccctgcacttacggtccacactcctctggcaagagggtctcaaccacctcacagtggtagttgattgctggctagctgagggcagggtatgagtcttaatccttttcatatccccagaacctgtttgtgacttgcccaaagcaggtttcgactaataattgtgccatgataaatgtatgaaggctggctgggtgtgtgagaagctgtggttgacttcctgttttggggaaggatggagacacatcggcttgcaggtggtggccagccctgagtgtgacgacccttccagctgcttgcagcatcattgaggtgacaaagagaaccaggcaggaattcccctccgagctccaggcctggctgagtgagcctgttgcttccttagaccacgaggcgggaggctgtaccttggtcatgcaggcctgggatgcttccttttccagaagggccaggactgtttccacatggccctcacgggctgcaatgtgcaggggggtgtgcccggcggtggtggccaggttggggttggcgttattttccagcaggagcttcaccatgtttgtgtggccgatgcgagctgcacagtgaagtggggtctggtcatcctggaccccgaagggaaaacaaagaagaagaaacgctaatgttaccaaatccaacttttcatcttacagagaagcaaggcagggcccagagagggcaagtgaccttctcaaggtcacacagctaagaagatgaagagtcaggattcgaatcaagtctctgagttacaggaaccaatatgctgtatcctactgaatccttacaacagttcttcaagtgagctgttatttctaccttatttcccaaaggcccagccctcccatctgtaaaatgggaataataacgtctacttgctagggctcagctgggatcaagctgataatgtacatggtttctgcgtttggtgcataaaaggcactcaatgcagtgtggctgctcatccgtctcccacatcctttctgagtggatgcgcttgtctttctgcttgaactctagtttgattttctctgtgctggggtcaggggagtctcaactgctgacagagaatgaggacttttccacccacacccccccacttcctgtttctgaatgctgctgtcgggctgcctgggccaggtctcatggggcccagctggaggcttccctcgagggccccaaacacaaatcacaggcctgactctaaggagaacccatcgtggcctgtggttaggaagcctgctgttggccgagtgagcaactggcaaactccacagctcttctcactgtctactcctccaacccccgcaaaatgtgtttacagcaagggggaactctccagttttagatcaagtaattcttgcctgatttttgctggcaatgctttctttaaaacgttgcccccctccttacatggcaactgtcatcgttagcccaggacatactcaggccagccacgcaccttggactttccttattttaaagaaatgtggctctcatgcagaaatacccctggtcttctcaaaccccctgcaaagcagaatctgggcgctcagagtgacctgatcaggatgaaaagtgatccccaggccacagcactgcagccccgcctggaatgaggatgggttctctgcacagtgctggaactgctcacatctgaaacccttcccttcctgccttcactactcaccttggccttggcattgactttggctttgttctggagtaaatatttggccacttccgtgtgcccggctctggctgccatgtgtagcggggtctccactttctataaaataacaaaattatagaactgttcatacatgcctgctgtccaaaacggcacacacagagctaggaagtgcagtctggagtggcttggtgggtttttgtccaagaggtggagttgccccagcaggcagctctttagcctggtatgtgtgcatgtgtgcatgagcatgtatgtgtgtatgtgtgtgtgtgcacatacgtgcaggtgcatgcgtgtatatgagtttatgtgtgtgtctgtgtattctaggtacacttaaaagtaaaccccagagctaatgaatattcaaaaatgtaaatgtattcccagtgaacacttacagacgttccaaaattattgtccaaaacaaagcctccaaggtttacggatgtgtgagaaatttaatccagaaagcgtcagtacacagggatgtcctcccccagtctgaagcattggctgttctgggaatcgtagctctgtccccagagagtaggactgggagcactggtgaaagctgccctctgagctcttggtctaggggagcaagcccctgcctgcctgagggcttaccacgttggagacgttgggcgacgccccccgctgcaggaggttcttcacgatgggaaggtgccccatgaaggaggccacgtggagaggtgtcaggccagactgaaacagacaaaggcagagtccgataagtgggagtctttccgctcccctgaagaagagagaacctgacagtatctaacgctttcacaaatgattttccaagaaaagggagctatatgaggtgggtttgcttccaagaaaatggttggagaaaaaaattactgtgggcaagtcgtgcccactcttacaacttgcaaaaattgtgtctgatcttggaaggctccatgagacttgactcatgttcccttgtcttagtcacccctgattcattccttccagcagtccagacttgcagacacacacacccctgcagccatacaaagctacaaagagcgactcttggagaaggtgggtcgggggagaccacaggcctgcccccaggctcctctgcagtctctcctacctcggtgaccgcgtcgatcgaggctcccgtcttcagcagcagctccatgacacggacgtggttctttttgcaggcgatgtgtaagggggtaaagccattctgcagcccacacaaagggagacagacaagcaggagcttacacacgggcccaaggaacgcccagaagaccacctggctgctctaaaaggcagctgctgcccaggccaccagcagatgcccatagaccaatcaacgaattaatgccaattgattagtcttataatgtcaattaatgcaaatcatgtaagagacaggtggctctcacttgatgcactagatatgttcctgaacatgttgtttataaaccttttttaaaaatttattcatattttggatgcactaaaagatcctgccatttaaagccccctaagggtaaatttacaataaaagagtacttttgtgaagcaaatcatgttccctcttccctgaaaccactgatcatttttagtgaaatggatttctgctttaaagtgtgatatactctgaatgtaaactctgaagggcagaaatgtgtatttgtttttgtctgtttttttcagtggtttatccacttaaggcagtggttctcaaacacgggaggtggtggtgggggggtatcgtttgcacctcacccccaaaacatgtggcaatgtctggggacattttttattgtcagctagggaaggagagctatgagtgcttagtgggtagaggccagggacgctgctaaacatcctacaacacacaagaccacaaatatcgaccccaaatgtcaacagtcctgaggctgggaaatcccaactcccctataacagtacgtggcctgtgggcactgctcagtgaaagcttttttgagcgagtgagtgaatgagtgaatgaatgagccatcctctgccatccctggaggatatcctgcccctcagttctgctgccttgggaagaggcagagaggagatgtggttacaggcatgcttagtgcaaagctacagccctgctggatccccagactccctgggagcccctgtcctgggaaggaggcagaggaaccacaggagggatttgctctgggcctgagcttccctttacacgagtgccatgagaactacaagcccctctgtggacgaaggatgctcagctctggccatctcattcatccccaaagcagctcagaaagccacgcagcctctaaggaatcactcagctccaggcctggctccactggagagatgccccaagcccgcatacctaccatgcaggatgcttcctgagtccggtctcctgggcccaaactcatccctgacctcggcctggtcaccggggcaggggtcgatacccaggtgggtgtgcagtggagggtgcaggaggggtgcacaccaggcccccaccatccagtgctgtcacaccccactgctcaggcctcgaatctggggagctccgggcacctgccgcccttcccacaggcccagccatgcctctctgctcctgcccccagcctgccctgccactctgcaccttctccagcagcacccccactcaccagggctctggagttgggtttggcccctttatccagaaggaccttagccaccctgtggtgtccacagtgggcagccacgtggagtggggtcaggtggtccagggtgatgtcgtctatctctgcgtcgtattgcaacaggagccggacacagtcgaggtggtctccctgagccgccatgtgaattggggacaggccgttctgggtaaagaggaaaacacaagcaatcacaaagtcttctggggaccgagcatggagattcaggacgattccaacgtcactccctacttcttccctacacaatgtttccacaagtctctggagggagcttggctcaccctggcctccacgctcctgccggtctctgaccacagacattctcctttccacctggccaaaccttcaaagccatgtccagcagacccacctcttccagaaagccttccctgaccactctagactcctgtgggctttccttatctgcaccatgcgctcagaccttattctcatatttgcccaattatatccatagctaactttttaggggagtgtatctcttctctttatttatacgcctcttaagatcagtgacttagcctaatatttctccttaaatgccccacagtgccaaatacatgcatgtaacacacatcatggtccctaaattatgtgattttgaatgaatgaatgaatgaatgaattatgataaaatagaacttggatctaaatccctctgttccttgtccctatcaaatgcagttcagttaaagaaaattctgttaaggatactcatttctcaaacagcaatttgtttaaaaaacataaaagagagaggagactcattcattcacttagacattaattcaacacatatctatcaagtgattaatgtgcacctggtatgggttaagctctggggaaacagaagagaacagacataacccctgacccaaggaagcttgtagacagacatggtgttgtctttcagcgccctgaagtgggatgatcaaagcacagagttgtgcacaaacagatggcgtccctgatgaaggaggggcactgggagggaggaggtgaggcctgagctaggacttgaaaggagctgaatggaagttcaccaggaggaccaaaggggaagaacatcctagggagcagcaagtgcaacatcacagaggcagctaccctaggggaacccaggggcctccatgcagttcgacagtccggggtgaggtgattccaagcatggagtcaggctggagaggaggctggagctgcgccaagaaaggctaggagctcaggacctgggacttcagcttttagaaagtggaaatgagaggattttcatcaaggaagatgcaaatcaggttccatgacagcagatgttagtgttacaggctgaattaggtcccacaaaattcacatgctgcagtcttaacccccaggacctcagaatgtgaccttgtttggaaacaggatcttcggggatataataagctaaaatgaggtcattagtgtgagttctaatctatgactggcgtccttagaaacagggagatttgggcacctgcacagcaggaaaatgtcacatgaagatgaaggcagaggtcagcatgatgccctataagccaaggaaaccaaagattgtgcccaaaccaccagaagctcggggagagacctggaaaagatgttccctcacagcctcagaaggaatcaaccctgccaggcactgtagctcacccctgtaattcccgcactttgggaagcaaaggtgggcagatcacttgaggccaggagttcgagaccagcctggctaacatggtgaatccccatctctactaaaaatacaaaaataggccaggcgtggtggcatttgcctgcaatcccagctactcgggaagctgaggcacgagaatcgattgaacctgtgaggcggaggttgcagtgagtagagatcacactgctgcactccagcctgggtgactgagtgagacttcatctcaaaaaaaaaaaaaaaaaaaaaaaaaaaaagaaccaaccctgctgacaccttgatcttgaccctccagcttctggaagtgtgagacagtaagtttctgttgtttaagccactcagcatgtggttctttgttaaggtggactgagctaactcagttagttacacttgcatttcagaaaggttgtacgatagttcccaattgaaaagtcacatattctcagtaaggaattttcataagcattcttttcagccccattctaatgatctggataataaaacaaaaaatcttaacttctggccatgtattatgtttaaatacagcactcctggaaaaatgttgggaattttctaataatttaactgatagtagcaattctactttcatttagctgaggagttttacttttagatagcttttgaagacattatctcacatggtcatcccaataatcctaggagagagggtgggggctctccagatgaggaaactgaaacacagagagggcaagacacacgttcatagtcacacggcaaatcagccaaggatggagggctaaatgagaaactgctttagtagaggacaccctcatgcaacagcacacacagacacacccaagaaccagtgtggggactatgaatcatgacccaaattaacgacagctctacagaacagaacatgataatgtgtcgggaataaatcagctttcactgtatggtctaagccatcattttatgacagaactgctcgtgggaaacctcctgggtagctgtgagtgggcctggcttttgccttgctctgctctgacacagctcaattcacggggcagagggcccagagcaggcacaggcagcagtgtggctgacagctttcaccccttgaagactcgagtccttatgtcagagccacgtaacgggccttttctctggcccgtaatggaacctgagaagaactgtgttcttttctttttaacttcgcttcagtctggcccaggctctgaagacttctcagagtacttagtgcctgtcttttctggagctaggaagagagacatagggattgatctagagcagtagtaggcgaactacacaacctgtgagtcaaatctgccctgccaccagtgtttgtcaataacgttttattggaacacgggccctagtttgcatattgcctgtggctgcttttctgctacgttggcagtgttgaatcattgcaacagggaccacggcctgcaaagcctaaaattgtctcatacctggtcctttagataaaaagtttgccgaccctgatctagttaggcattagagctacactgagagtctcctacgtgataggccttgtaataaatgtcaaaggtgctatctcatctagtagtattagcatctctgttttacagaaataggatttgatgccaggtctgttggacctggagccctgtctagaaaatgcgcctgacaggaaggaagtacacaccttggttttggcttggattggtgccccgtggtccagcaggatctctgagattcgcacgtgcccatttcgagctgcacagtggagaggtgtcaattcgtcctttaaaagacagagtcaaaaacagaaagcccaaaaggcagctatcagaggccatttggagagaagactgcctatggcatcatcccagcccacgcaagtgctgacgtttcctcaagcaccagctcgacctcagcacagttttactattgcctcccactgcacgcggcactgcccagaatactgctgcaggcggctccgggaggctggtggtgcatccctaactaggtcaccaagggcccgctgctctgggtgaggcttgtgaggggggacctccctccccctgcctggctacagcacctgctggcacccaccttggtcttggtttctatctgggctccccgatccagcagcagccgcaccatgatcacgttgcccctgcgggaggcgatgtgcagtggcgtgatgccgttctgaagggaggaagcaggacggtcagggcgcgtcatccttccctggaatgcagctgctgtgcacccgctccccttgtccccagcccccagtccccaggcctgcaacagcgttgtcagggcatttctggcctaagatattttatttttttttattttttatttttttttttttttgagacggagtctcgctctgtcgcccaggctggagtgcagtggcgcgatctcgactcactgcaagctccgcctcccgggttcacgccattctcctgcctcagcctcctgtgtagctgggactacaggcacgcgccaccatgcccggctaatttttgtatttttagtagagacggggtttcaccgtgttagccaggatggtctcgatctcctgacctcgtgatccgcccgtctcggcctcccaaagtgctgggattacaggcgtgagccaccgcgcccggcctaagacattttaaaacctgaaaggacctgccaacaggatgggtcatcccaccacaccacccaagcccatgcctcccagagtcaacataacagactgcaggaaagtcagttatatggaaatcactctctgccctccaggtttcccatttttaggatgggcaaatggagtttagggttttctcaagacaaagcaggtggaaactggggggtagatgatcagaaacctgccagcaaggagcccgaccagacagcagggctgtttaacccacaggcacttctgccactgggatgaaacccatggtgccgaggcaggagcaactgccagccccaagcccccggacagtgagggcgcacgtgccccagggttacctgtggtgtgaaattgacgctggctcctctgttgaggagcaactgggccacgttgaggttctcgtagtgagccgcaatgtgcaggggcgtgaatcccgtctggggcacaacagagggggagaaacttgttatatgtgatttacttctatctcagaatcagccctgggatgcaggaaactcaggtggggcaacaggactttacagacaaaggagattttgatgggtgggaacatttggtgagggggtcaagagaggctttatggcacagtgtattcaaaagctgggggtctgccctgagcaacccgaattatatgttaacctcagactctgtgggcccgttcgtcagagtgatcaccgacaaagagattttcattcatgaatgaaagtgtaatggggctatggtctttttttcctcccatttagacagggtctcactgtgttgcccaggctggagtgcagtgtgatgtgatcacagctcacttcagcctcgacctcctgggctcaagcaatcttcccaccgcagcctccccagtagctgggactacaggcgaacaccatcatgcccagctaattttaaaaaaaatgttttagaggcagggtctcactatgttgtccaggctggtctccaattcctgggctcaaaccatcctcctgcctcaacctccgtccattgtcatcattctgttccagagcctgaaggcaggcctaaccccacccaggtgttttccagacaaaacccggtggatctggggccggtggaagaggggaggggcggggtgcaggaggggactttgaataactccagtaaatccatttccactaaaagaaaaccagcagcctcagcctacagacagcagatcagcagtgcctccgaacaccggagagcgtgcccaggtgcacgcaggcgtgcaaggtcccggaccccctttctccacaccccagcccctgcacgcctcctccctccactacggggcagccggggaggagagatgaaggaacatcaggaaggccgcctcctggggttccagggtgacccgccctgcccgcctggacacatttccagatgacctggagcaacaggaaccacccccgctgctcaccaagagcacgtttctgggcatctgccagggatttagagcggggctgtccaggggcccctctgcgtcctggggtgagggcgctcagtgcgcactgcccgccctgcacgctcggttctcctgcctgggaagtcgctgggcgtgcgcggtgccccctgagcccacgggcgtccgcggcccaaggctcctccctcctcctcgccctcaccttggaaagcacgtccgggttggggtcgttctgcagcagcaccgcagccgtgcgcgtgtcgtcgttgcgggccgcgatgtgcagggccgggaggcgcaccttccccttggtgccgtagttgatgaggtgcgcgacgacgttctcatggccctgctgcagggctaccgccagaggcgtgaagccgtcctggccagaggaggaaaatgctttgctctgactcgtctgacgccagccgcccttcacacgggacacacccttgcccctcgggcttatgctcccagcagccccagcctgagggacctacctccaccaaagccctcttcatccgccaagtttagcctaaatgccatctcctccctgaagcccttcctgcctccacttcctttctctgcaatctcacagagcctgccgaatttttctttagcattaatttagttttcctttataatttgcttccagtttgacttgttttaagaaacttttgactgctcagattctttgccggctctctttctcaccccatctgctggtaccaggatagtgccttgacaaggcagaacattactaacaccgaccaaaggccagagtccacaccaggccctgataattcaattgtgagctattattattattattattttatttttgagacagggtctcactctgtcactcaggttggagtatggtggtgcaatcatggctcactgcagccttaacctcttgggctcaagtgatcctcccacttcagcttcccaagtagctaagaataaggcacacaccaccacacccagctaattttctttttctgtagagacggggtcttgctgtgttgcccaggctggtcttgaattcctggcctcaagtgatcctcccacctcagcctcccaaagcggttggattataggcatgagccactgcgcttggccatgagctactattattaattccctcagttgtggacatactaaagggcacaggaccgcaggaactgataaaacggaatgacaacaaagtcatgtcattgagccatccaaagttaagagtcaagagactccttggctctatctagtccaatttcatcatttcaccaatgacaagactcaggaccatagctaatgagacttgtccaagggtgcatggtggttttgtggcaagagcctttctcattaaggcccaatgcaaacttgccaaccatacacatgcatgcttcgcctgccccctccagtcacaagtattggccacagcgggaaggacaccctcaagtgtgacgtcgtttctttggtacgtgtctgggccttcttcaagacccatgactttgtcattagtcccttgcagaacctgacagcactctggattagtgcagcgacctgaaggtcatccatcatgacatggatgcaccccaagccacatcccaggtaggtgtcacctgaagcaaggttgtacacctgggagacttctggtggtgacgacatttttccaaggtacttacttctgtggctacattctggttagctccattttccagtaaaaacttaaccacttccaagtggttctcttgtgctgccatgtacaggggtgtaaaacctttctgtaaaccaagagaggacatcattagcatccacccgcaatttaagaaaggcctacaccagcacaacgtcctctcacctggaggacagcgctctcttcattccatttcctcccacctgacccctcctaaggaaactcattgtcatggtgactggcgtcctgggattattacaaaaggccacagaggctgtgcctcccctcgccaccgtaggtcagtctcttcagctcacatactcctcattgatttcatcaatgctgcactgcacacctcattcccccagtcctcagtttctctctccacctaggctacaactggacatactatttggcttaggtccaaaacaattcaaccccgtcatgcttaggacacgcggtctatgcatgcgaaataataaaggacaccttcaccactgctcagagacatgctcctgagaaatctaggccctgccccacagtagtgtgtgtgttaacacggctgccaatggacccacgagggagcagcaaagaggaaccacctgtggaaaggcaacaccctctagtccagaccagagagccattacctgtgactgggcgttgacgttggctccatagttgacaagctcccggaccacctcatcctgcccggctagagcagcgatgtgcagggccgtgttccccttctgaaacacatgggggaagggaacagaggcggtttcccactgggcccgctacgggaccagcaaaggtctgtggacaggtgctgcttgagggacccgggggctttcttcatggccaaaaggggtagaaaggacacacgtgtgtgcttgacccattgcacatcctgaaatcatactgaaagtacagggaggaagatccagcctgttctctatgacaaacaatgctgcaagagccataaaaaagaaggaaatcaggtcttccgtagcaactcagctggaactggaggccagtaacttacatgaagcaactcagaagcagaaagtcaaatactgcatgttctcactcgtaagtatgagctacataatgtgcacacgtggacatacagagagtggagagacactgaagactcagagggtgggaggtgggggcaatgagaaattatcctttggatgggatgcccactcttcgggtgatggccacactaacagcccaggcttcaccactacacaatgtatccatggaacaaagctgcactcataccccctcaatctataaaaagaaaaacatttaaaaagaagaccaccagcactggctggtgtgattggagtggcgcaggaagggggcaggtgacactgagatgtgcggttgaaggagagtgcggccatgtcaaaggaactcctttttttctattatgtatccataataattaaaaataaaaaatttttataaaagaaaaataatactgaaagaaaaaaacaccccccgccaacacacaacttctgaacatctaatctgctgtgtgcgtgcagcgtcctgtccccagcagacagcgcgttggcgtccctcaggacacacactggaaggcttgtcagcgagctggccttccgcggacctgcagctccgctcagcctgcaattctgcaaggcaacaagccctctgagaggcctgggagcgccaggaaaggaggccagcaggtccctcaggcccatacctttgacgccatcccagggatacccacagaccacaagctgcagtggagcggacaaagagatgggaggcaggagagtgaggaaagcattatacagaaaaggaaagggtaagatcaactctatgatgtatgtagggaagagaagaaaaatcagaaaataaatggggggtaataaatggaatacaatctggccaagaaaaatacaaagaatatgcaacatactagtaagcaaaatgtaatgagtaagggttcaccaaatccaagaggagagaaaaactggagagaataaacactggaggaaaaccaggcacgtaattgttttaaactttgtaaaagataagaaccaatagcagagactgagaaataaggcaggttctgagaaagtgagtttttgttttgttttattttgtttttagaattggaggtctcgctctaacacccaggcaggagcacagtggcaccatcataactcactgcagcctccaactcctgggctcaagcgatcctcccacctcagcctcccaagtaggtggggactaaggcgtgtgccaccgtgcccagccaatttttaaatttttttgtagagatgggctctcactttgttgtccaggctggtctcctgtcttagcctctcagcactctggtattacaggcatgggcctgagaacatgagtttaacattctccggttttcttgtctggattcttttttgatattaaacaacaattcacagacaggaccagcagcctccatctgttcccgggatacccacagccttccagccaggctcctgccagcccctgggggtcctggaccacaatgtcagcactgcctctgggggtggactcccctgggtgccctgcacctgagcccccattcagggagttgaggggcaggggcgggcagcctccactccatgcttctgtcaaatagggcgagtggagaaaataggtccatggtcggacccatctgtccctgcactacttaaggagcagagatctcaaacaacctcatttttagagtttagacagtatgtagttctttttactaaactacataatcattaactaatccatttcaagaaacttaagaactgacaagcagggactttggactctgaccttgcccagtggctcctgtcacctggaggaaaagcttcctcactgagatggaagggagcagcctggggcctagccgtgtggccccccagccgctgctgaccccgcttccccgggtcagggaggcagccccatgaggccgccctgggggctgggaagcagctcagttctgtttcttgtactctgcctggtaattcaagcataaagcctggggctgggtgcagcagctcacattggtaatcctggcactttgggaggccaaggcgggaggattgcttgagtccaggagttcaagaccagcctgggaaacagtgagacccagtctgtctgtcttttctttcttttttttttttttttaaaggcataaagcctgtttatgttttgttttgtttaaaggcaggcacttcccatctgttgcctcctgaagttgtctttttgatttctcctcaagttctatttgatgaagaaaaaggtttttcctcaggtatccattggagaataaatgccagatatgaaagtctggaagctcattaataatttttcatagaagtccaaagagcctccattgagaggcttggcacctgctgtaccaaatggagcagcactgctggcaccagaaacttttctagacaccaggacgctgagctccaagtggcatcttctgggctcccatggaaaagaaggaggcatcctgggtgcattcattcactggccacatgcttcctgggcataagcacagaaggcctgggccagcatggaggcacagaggccatggagacatcaagaggctcacgtcaaaggtttctttccaactgacccttcctgcctgaagtccaatgatatgagagctttccttaccccacgaggaggggaaggtcaccctgttttggggagctcatcagtgatggaaacctggctatggatcttggttcgggccagctgagccaacggtagcataagtgaggaataagaacacagggaaaattctggaagtggacctcctttcccctatctacacacacacattatgaggctcaagaaggcccctggcctaagttgtgggagtcacaggaaaagggatttgtgagcctctattttctctgcccctccctcaccatgaaagaacatggcctcaaaggagcaggaaaaattacttagctatattttgctccacaaacacccaatttctctattttcaggggctcacagagctcagagcagggaggatggttgcatgggtgctgattgaatgcaagtggaagggggagagggaccccaagtgagagagcaggcttttttccagtggagatgaaagctgtccccattcattaacagcttaggtgctgagctccagtctctaagagctggagataggaggatggggagagaatgcgtttgttttgtgcttttaaaatttctaagtacattttaggaatctaaattggttttggctttttactctttttcttcttttttttttttcatctttctgctgcctgggagccccatcacagtccccaatctgttgtgactcttccccagcccacggtttcagttccacctttttttccccctctctctggatggtattccaaagccacgttggcttagaaaatttctaaaaataaaaaagacacaccaagtgttcacttgcaaaatcacaacctggggaggagattcggaaacagtcgaagcgctgaagcctcgtgtttccgcagcccttgaaggcacgccagggcaggcgccgctccggcacacgcggggcaggtcagatggcacacagctcacagccaggtacgtgggagtgtgcagagaaaataatctcacccttcatccacacgaaaagcagggtgggaacaattggaatttgacatagaatttgggaaaaaaataccccgtatccagtcagaaagagcaactcagtttattttacccataagtgcaataagatcttttcacattcaggaaatgacatgaaaattacagaattttacctcaagagatgattctaccttcataatattttggtagttcacttcataaccataaattatatctgttctctacatattgttcttctatgttctctgcttgagaggcggcaaactgtttgctgcatggaactgaaattgaggttgtgtgtgagaccacgtgtaatatataccaaaaggaaaataagaggctagggggaaagaactccagaagaaaaacatgggaaaggaacagaggagggaagagaagagaaaacagtaactggggagacagtacttgagttagcaaatggagatgattttttgtttcattttatttatttatttttgagagggagtctgtctctgtcacccaggctggagtgcaatggcgcgatctcggctcaccgcaacctccgcctcctgggttcaagcgattctcctgcctcagcttcccgagtagctgggattacaggcctgtgccaccacgactggctgatttttgtatgtttagtaaagatggggtttcgccatgttggctgggctggtttcgaactcctaaccgcagatgatctcccctcctcggcctcccaaagtgctgggattagaggtatgagccaccacgtccagccttgtttcgttttatttatttatttatttatttttgagatggagtttcactctgtcacccaggctagagtgcagtggtgcagtcatggctcactgcaacctccacctccgcttgaggcagggttcaagcgattcccctgcctcagtctcctgagtagctgggattacaggcgcccgccaccacgcccggctaatttttgtatttttagtagagacggggtttcaccatgttggccaagctggtctcaaactcctgacctcaagtgatcctcccgcctcagcctcccaaagtgctgggattacaggcgtgagccaccgcgcccagtctgtttcattttatttttaattgctggctgcatcttgtttgataaataagatgcatgtcaggtaaaaaatgaaacttattttgcaatctatagatgtatcaatttcatgactctgggattttgaagttgagtcactggtatttataatctactgaaatggagtgaaatacgttactgtggatgcctggcgtcgccccatgccaaacgcctcctcatgaaacagaatgctgttccagatcgttagcgaggagaggaaatcagtttggggctgaacaaggaagacttgctggagaaggagaaatgaaagaaatctggattcttctctacaaccttcagtaacaacatggtcactagtatttattgattccttactacaggaatcagtaatcaattaatatatccaataatcaataaatgcatccaataagtagtaaatgcatccatccaataaatacatccaggcatttgatgtatgccatctcacttacttttcataccaaccctgcaactaagtattattatctccattttacagacaaagaagctgaggcttcacagtggccaagtaactcgtcccaggtcacagagcgtgaagtatgtctgctgggattcgactccaggcacctgattggcgcttccagagcccttggacactgagttcgagtcaaggaccctgagaaagtataaagccatcaggaaagggctctatttttagatacgtaacctagtgatgaggataaaggcccactgaatctttctggaaatggggtctgtttcaggcagcttcagggattcagagaactaaaaagtgattggaaggataagagaaattcagatgcatgcctgagttctctcatgaaggactggtttctaaggaaggactcacaaacttgaattttcaatgcaaagctcccccactccctgtgagacataccttggttgtcgtttctagaatgatttctttgtgcagaagttcaaccaccattttcacatggccttccttagaagccagatgcaagccattcaacccattctgtaaagagcagagaggcgggaagggcatggttagtcaaatggtgctttctgcacgtcccagtgggggcccaggccccttcccagccctgaggtgttcacagcactggagaaaaggagtggagtgtgtctagaggttggaaggggcacagggcagggccacccagcctccccttcacgcctcaggtcacaacagagcagagatggaaaggaagggcaagaactagcccgccactcccagatgtgaattaggcagtaagctctcacaacacccatggtgaccttgaaattcatgtcgaggccaggctttaggcagcccacttaattaaaatgatgtagcttcaacccctggttaattttcacaacagtgaccaggaaaagcaaagtggtaacaccagtgcatcctaaatacttgtagaaatagacatatgtttggtaagatgttaaactctgaagcaaggtcatatgagaaatgaataccaccaaccacccagctgtaagatttcctcaatagaaaaatcagtattaaaatagcccctttggcccagtacagtggcttacacctgtagtcgcagcgctttgggaggctgaagcaggctggttgcttgagcccaggattttgagaccagcctgggcaacatgatgaaaccctagctctacaaaagaaaaaaaaaagcccacagaagtagacaggtgtggtagtgtgtgcctatagtcccagctactcagggggctgaggtgggagaatcacctgagcccaggagtttgaggctacagtgagctgagatcctgctactgggtgacagggccagaccctgtctcaaaaataaaaataaaatgtaaaacataaaatagcccctttgccatcccaccatttcaaaggtgaccaaagaaggctgcctgacagttaagctttaggaaaagcaaaaaacaaacaaacaaacaaacaaaacacattttccttgcccaacccttagcccacaagagcagagccaattaaaatttaaccaattaaagttccagctgcatctggtgaagctgccactgtgctttatggaaggcagccaagttcaagttttattcatcactctcatgcttcctgctcttctgatccttgccctgaaaggtcttgaaactttccggcaaaagctgacatcaaggagtgctactcggagccacaaataagtctgacaatatgaaggagcaaaatatcaattccaacggatgagtcgatcttggctccgtacagaaaatgattttagtcagtgagcaaactccacctcctgcttttttattttgttcctgtcctcctccttccccgccagcaattttcccctcctgtcctcctcctcctggcctcccgttttgattaattctgttctattgcgttcctttccaggggaggcctcagagccacttcaggctccagttcatgaaacagatcctcaccacctagacggagggcttggtttctgcaggtctgatgtgcggggtccctgactcacgtccccaaatatctccgcagccccaccctgcgttcctcgaattccagctctcccattgtgtcagggcatcattttcaggaggttcttgttcaaacacaagtattctacctgggagtgggagtgcattagcccattcacagattaggcaaattgctttgccataactagcagaggaaagtcacccaaagtcatgataggagaatggaaggggtccaacgcttcttttatgtggggaccttggatgcagcaaatataacagatgccttggatgttagagaaatgagaaggggggctgcaaagggaacattacctacctcctatttaggtcagggcagccctgcacccttgcctatcagcacagccagccttgccagggtgtgtgtgtagggagagggggtggttcaccaaatatttcctcatgcaaacgcctgaaaatgaccactggccattaggtttcctcctcctgcagattttgcacaccattcagtgaagggtccaaagctgtgtggattcttctcacccggtgtcaatgagtttattagagaaagctaggtcagagccagtctgggtaatagagagggagaaagtgcttgagggccagatgggaatccaggagaaggggagagagcactgggcaggcagaaaccaactcccctccccttgatttgcaagacaaattcactgcaaagcaatttgtcgagtgaccagtgcgctgagagcctggagccactcttgcttctgcatcttgcaactcttttctggatgggtctgcaggaaggagtccctgctccttctcagagcagggcgagctttttcaggcagcacacagcatttctgcaagcgctcttccaacccagcggcagccttatctagaagcttcctagtgctgacagcggatgccctgtgattgcttgggaactgggttggtgtttgtggctgtcggcatggctggagtgacagcccggcagctgctgctggccgcttactgcgggaagctgactcgcagtggcagccagccttgcctcggtgctgacggctggggttttagtgcttacttgggcagcgcagtcgctctgatgagcatctgtgggtcctgaatgcatcaaagccacaaaaccagcaagcctggaaagaaatagctaatgcttgccgctaatgctctgggacggccggcccctgctgtttgaggccaatgtcacgatttcaatccggagggattctagatatactgtctgaccagagaatgcaggactcgaaagggatattagaggtccctgaactccaccctttcatctgcagctgaggaagtcaaggcccagagtagtcaaacgattggcagaggccatgcagcgtctccagggcacagccacacacaggaccaacctggatttcccagaaaaaaggaggtttggttttctccccgctaaaaactactgtgataactggctgggcacggtggctcacatctgtaatcccagcactttgggaactgaagcagccggatcacttgagggcaggagttcgagaccagccgggacagcatggagaaactctgtctctactaaaaatacaacaattagccaggtgtggtgacacgcgtctgtagtcccagctactcaggaggctgaggtaggagaacagtttgaacctgggaggccaaggttgcagcaagcagagatcacaccactgaattccagcctgggtgacagagagagactctgtctcaacaaaataaaacaaaaccaaacccaaaacgatgtgtttctttttatcagatgatgaaagcatatcttcccttttctggtctccatgaagcttagagctaacgaatggatctgattgtgacctcggcaattgatctctaggattttattcatcactctgatctgcagaaaaccccctttcttctcttcctgggtcccatgcctccctcgcaaagggcagagagtaagaccctcgccatgcaaggggccgcctgagtagacctgcctctcgcggagctgcactctccctccatcccagatcctggcccagcgatctccttcttatgatttttaaaaaatgttttctcactttattgtagatttgtctttaacatagtcaccctaaatcacttccaagtctattactgcggggatctgaatccactgttctcagcagggccactgaatcaaaccccactgggcacagttaatgagagagatgcaagatggtccgggaatgcaatgcctgtaaaaaacacatggggacggggctgaggaagcacttgtctcagccacaggtgtggacactgttgccatcaaacgctgagcaattacttaacccaactcaacaaatatttatggagaacctcgtctgtgtctggccctgtgctagaaatgaatcaaacacaaactgtttcccttgaagaactcagttttgtagggaacacggatgcataaaaaataaatgcaaaatcatgtgaaaaaagccccaaacagcatgtaaaggggtagaggtggcacagaagagaaaagagttgttctgtcaagaagacccagaaagcttcgcagaggacttttcaaggcagaggtgcccacctgcacaaagacagagttgcaagttcattaaaaacagcaagatgagaagtgtttagattctaaacccataagctaaaatatgctcccagctctctcagcaagtgccctcctcttcctttcccaaagcatttggatacaacagatgcacaaacatccagaccccagcagcacctctcctccagcaattggtcttagtacgtagatggctgcgtctacctacctaaggggtggtgacagccacaagtcaccaccatctagcagcggaagttgctgaacacctgaaaacgaacctcctgcacacacacacaaaggagcttgtacagctgtcttattaaatgcataactagtttatgcaggagaccacttctgatatccaaaagagcattttgtggataaataccatatttaatacttcctttttctttaagcagatttttcattgctcaaatgagaaggaggaggaggactgcaaattatgtgagctatttgttcttagctgtaagtatggacagagatgaactgtaatttaccacctcttcaaaactgagaatcatgttttactttagctaaatcaagtttaagttagcttggttgctaaaagtaaaaggcagcttgctgagacttgctttgaatcttttcggcgactccatctcaccttcacagccacttttcttgaagccaaatggcagacaggctgttaaaggggattggaggtgtggataaatcacatatttcttccctcaaataacagggtgtagaagataagcaaaaaggaagcagaataatataagagtaaatgatttcactaaattagaagctggggagaaaagcaataactacttgtggccattttttaaccatatggctttccctggaggaaaacaccagttcgctagagtctttttcctacagatactgccttctggagctccaattacatgtgttttagaccagttgatgttgttccatagctcttggctactctgttttggtttgttttttccccctcttttctctcttttctttcaatttgaattatttctattgacttatcctcaagttctttaattctctcctcagttatgtccagtctactgatgaacctgttgaataaattcttcatttctgagaaagtgtcttttgttttcagcatttcattgaactttttcttatagttttcatctctctgctgaaaatttccatctactcatgaatgttatctacttttcccactagatactttaacatattaatcatagttattttaaagtccatctaatacttccaacatccaacattgtggtcatctctaggtctgattctgtttattgctttgtctctcgacaatagttcattgtttttttctttcttttttttttttttttttggtgtgtgataatttttagttgagtgccagacatcaagcatagaagagcagtagagactgaggtaaatagtatttacggctggaaatcaacatgcctcttcttctgtgaagttgtcagcatggaggtgagaaggctgagtcaatctcaggggttgacctgagtttgagttttgttgttactttcagtgcaccacagccttcacattcttacaaaggtagactgcggttatcttgaactttgagttggagctggggtgccaggggctttttgtgtgagtgttcttgacctccctcaacttccagccatcctgcatgcctgggccttaaatgaggtaattctccatgctcctactcttctcccagcagtggcctgctcttccttattacaacatgttaggctggcaggaatgggcatgttctcttttgtcgtgctccagcttcagtattaggcaggctctgtacatctggccctctaaggtgggatttcttttccatgtttagcaatccttcccccttctctgtggcagcaaaacctgtctcacttgcactggtcttgggtgagtttcttgctcctcccccagcagtagtcgacccctgcttgttttttttgtgtttgtttttgattttttttttttttttagatggagtttcactctcattgcccaggctggagtgcagtggcatgatcttggctcactgcaacctccacctcccaagttcaagcaattcacctgcctcaacctcccaagtagctgggattacaggcgtctgccaccacgcctggctaattttttgcatttttagtagacggggtttcaccatgttggccaggctggtctcgaactcctgaacttaggtagtctacccgtctcggcctcccaaagtgctgggattacaggcgtgagccaccacgcccaattgcctgcttgttattggtgtagaatcccgggcccaaaacaatctacagcccctcccctaggagtcccaaggtggctgctcctatcttccctacagcagcaagtcattggcaggaatgtttcctacccctcccctggctgaggcagtttgtttctattcctcccctaggtctacggtctaaggattggtgtatctctgtatgcgtgcactctatatacacattcatgtaatcaccacccctcaatgtctacttcaaattaaggttcctgagttggtgcagtgagtgctggataagccagctcaggcctctggggctgacacacaggtctttgctcaaccatgtcccctgggatacaggcgcaaaccaggcccaactggcagacctgtgggcttcagcctggggccaggcactgcctcccacacctggacagcactggattaacaggcctgctcttacaggtaggctgggctggcttctggccatgcagggatctctggtccccaggagggggacagggcaggtgaggatgctgggtgggtggggaagagcaattgccttgttcacctcatgcacccatggggacctgggagtcccatttacagatgggtggggcttccaacccactccacccagaactgggcttccctcctctcagcaccccatggaggtaggggaggggaggcctgttttattctcagaataaatgttaccacaatttcaaaaataaaaataaaggtgagagggtctgtttttgcttcacatgagggaaagatctggagaagcggtgaaagctttgtgtccgttcctccctccacccctgcctgcacagtcacaggtcacctcctacacacctggctgtcgagggggcctcctctggctcctgacgtagcccaatacttctcatgggggccccgtggagaaaagcctgttccagacacactggcccacacttggccttcaagaacttttaagattttggtggctgggtgtgatggtttttaatcccagcactttgggaggctgaggtgggaggatcccttgagcccagcagttcaaggctgcagtgagctatgattgcaccactgtccttgagcctgagtggtggagtgagaccttacctgaaaaaaaaaaaaaagattttggcttgtatggtgaacacctctctttcctgacctctgccaaagctgaagcgatttacgtggcccgcttcttagagggctttgcctctgtttgaaattctgtttactcagctgccttactacctcaggcaggcatgagatgggttcaggaaaaaatgatcactttgtaaattatcgagctttttgtcattgtcggggtaggagccatgctctctgcagccttctgcatcctacatactccctgtactgagcccttaaggccagctgtccccatatgatctctttccacatggtcctaacataggagataaccttttaaggctctttttggcaaaaatcttcatgccaagcacacacacctagagctgtgcacctgcctttgctctttttcaggtggaatgtcaactgacaggattgttctgaaaagcgatctgtgtgatgggcggggaaggagacctcagctaggctatgtttcttttaacatttttaagaagaagaagaaaaaagtcacattcagcctgattaattcaatgtggagtattttcttgcaccaactgtgagaaattccattggcaaaatacacaattccagacatttgttctcgttaaattattcctctgtttagctcttctgattgccccagttgcactaattgatttccaaatgtatgaatacaggagacacggggaatttaactcttcctgtcaagagaaggggaacggtttgaaatagaaaggccttggtgtctctgcaaaactgcaagaacatctcaaaagtgaatgcctacattcccatgaggacacacagccctcacacctcctttccacgcagctgtttatttcacccgtgcacaaggctggccctgcctctatggagcaggcagcttcagctgcatcccgtgactgaggacctccccaccccacacctcctgaaattcactgctcagtcccccactccctttctttgagctgtgtttccagagaacctaggcaacatgttcatataacactcgggaaacacaaactttgcatcaatcaatatctattatccaatgattggtcgagccaggcccagaggcaagggagcactggccaggggaagatattatggggatggaaggcaccgcagtcctagaaagaataggcccgatagcagtggcagagacaccaaggagtctgaggaccccagagtgaataaaatgaaagatgagaaaagaaatgcctagatgcttttacctttacccatgcaggcagcaaagatccaggcagaagatcttgcctgtgataaggaggaagttgtctacatagtggactcctctatttaatatcctaggttagtgggatatatttcatatcccactttcctattcaatttggattctctgttgagttattataaacaagcaagtgctatactcgatgtcacagaagcttaattccgcaaatagcaaccaacttgtacatgtgtgacctctagctttgctctattattggtccttgtttgtggagtgagaccacaacagaatatattacgtttgcaggtctgcagccctgcagcagagtaggagagaagagcctaaactggggttacagagaggaaaagaaggactggagtgactgccatacttactccaaatcctgaaactgatgagaatgaaagaaagagcagggaagaaagcaaggcaaagaccatggagccacaggaggcagagcagatgatgggaagggaaggagcgacggcatgatagtttgtctagaagaggaaatgaactgagacacatcaaaaaaattactagagctatataagttttgatttctttcctcaaatcgcctacatcaaattttcaaccaaaacagaaacgaaatcaaagctgaaggagtgctttcccatcttcccttctcatccttctccttccctccccacccagctggagatgtcggccttagagggcagtgaacagggaggtgccctgcagggcatgggcagcagcgtgtctggggtctgagaaagaggacagctaatggagtggttgggaggttgtcatcacactgagcaaacaagtcagtgaatatgttaaggaggacgggcatcagtggcattcaggcctcctgctgtgtgaaggactgtacaaacatggggagaggaaaggctagaaagaattccgagcactgggctggaaccagaaatattggtgtgatctcattgattcttcatatatatatatatacatagacagctgtagacgtagttagcagactcatgtatgcatacacgcatgcacacagacatatgacaacccggagcaatgggctcatcgggggctggaccctggtgtctaagtgctgtctccactaacaggaaccagggatctttggagaagtgctgagccaggggtggggcagggcaagtacaaaatgagcctggggcaccttgtgccagaaagtaggaaaatgctcaaggaatgatgaggacatgtcaaaggatgaagaagccaactgatgggaaggacttttattggcccagcttagacttgaccattaaaataagtcatgggagtatcaggttgaaacgaagacaaatccataggagacaaatccatgagtccaaacagctctacacaaataaagaaaaaataaattaatggggaaaagaaaaagcttatcctttagtagaacgccagctaaaaaatgtagaagacatgatggaaatgaggaatcactgtctggagccaccacagcagtagctgatacaggcagatgtcattaatgggctattaatgtcattaatagactgaaatatttccctccctcaacacaatactgatcaattacaaagggaaaagcagtgaacttatagtagaaaaacgtggctggcaccaactttacttggtgatcaagattaacatccccaggagtggggagggagcatgatttcttttcttttttttttttttttttgagacagagtcttgctctattgcccaggctggagtgcagtggtgcaatctcggctcactgcaagctccgcctcccgggttcacaccattctcctgcctcagcctcccaagtagctgggactacaggcccgccaccacgcccagctaatttttttatatttttagtagagacggggtttcacagtgttcaccaggatggtctcgatctcctgacctcgtgatctgcccacctcggcctcccaaagtgctgggattacaggcgtgagcctccgcgcccgatgggagcatgatttctatggtattcctgtccagcatggccatatggccatgaggcagcatcagacagacagctgaggctcaaactacagcatggaaaacagtcaaacacatgagaaatgggcacgctgagggcctattccagatggaaggaggctgatgagacatgacaactaaatgcaaaatatcttcctggagagatttctgaaccagagaaagagagacagaaaaaggtggaggggaacagagacagcgtgagaaaacagacagagacagagagacagagagaggaaaggatggaggggagcaggaaagggagcggagggagaaagaagaaggggcggggagatgtgaaggaaggaggcacagagagagggagaaattgtcagaggagggacagttagcaaaatcctaatggagtctgtggattggatggttgtgttgcatcagtgttgatttccagattggcaggcacgtgggatggatacgtgggaaagtgtccttacttttggatggtgtacactggactgtctggggatgtgccgaatcaggtcacatgtcctacattatagacagatgaacagggacaggaagtgtagaagaacgggcgtagataatgcagacacgggagatgcgggaattctctgtacgttcttgtaacttttctatagattcggaactactaaacaattttttaatgggaggtaaggaggagtggtggtgaggtgcagaggctgctggaggagaggagtgatgttgtgggggtaattctggggtctaagtaggggacaggtggcccgctggggcttctacacattttgggaatcacagccagtatgaagttataattacatctatctgttctggtttttcctttctttcttttagagatggggtcttgctatgttgcccaggctggagtactatggctattcacaggggagatcacagctcaccacaaacctcgaactcctgggctcaggcgatcctcctgagtagctgggactacaggtgcagggccatgcctggctaatttgttttttaatgtttaatttttaaattattgatttgttctgtaggacaaggtctcactatgttgctcaggctggtcttgaactcctgggctcaagccatcctcccgcctcagccttctgagtggctgggcatctgtcctatttgtaaaggaactgtgaggcacgacctttactggagttctgatattattccaggatggaaaccccagagtgcaatcaaacacactaagagaacagccctcagcccacagggaaacccgctgatgggggagacctcttctggagggcaggcctctcgttctgcggggccataccacctgcagcctctttctaacccggatagtttatggctccccagagactgcttggtgggaaaggtctgctaaaaatatatgatcttggaatctaaggaatcagaagccaggcagagctgaagcaactgccgtaaccctagtggaaaatcacacctgatctcctttgcaaatctgtctcttgcctagggacaggaaagacagaataagagaagaaactgagaggacagcacaaactcagagagaggtggcgcagatggaaagggaggcaaccggctctgagcattttctctgtttgctttgttgcaatctaactttagccctcctgcctgggtagcgcttaggattcacagtttgctggatactcatgaggaggaaaaacactctaatccttttcattaccttaagaaaaaggaatgcacaacgattttagagctctgcaaggaaatgaatcaacctcagctcaccttctttctattttgattgtacagaactcgcagcagccctgtgctctgagaaatcctgcatctcagcagcaaatcaactgcagaggctgatgggccctggggaaggtggaggaggaagtgtgagctcgagttaatgagagaatgggactctgaaatgcagttcagcatctaagaatatctcctatggactagaaagagcatctatgcccgagatcttggtattctttaaaaaaaaaaaaaaaagacccagacctttagaagaagggcagtggggtcaggagaaaggaaccctgggcttctaaactgtccttatctatgacctcccaggcttcaatttatgctgctttgcaatgacaaaactgctctgagcttccagtttcgtctgaattccataattccaagaataagacaacgtaacagcttgcagaaaagagttaagctatgtgttttgcatgtacagaaaaagtaatatgccaagattcatataaactgttaacagtggtttcgcagaacgtaagggagttaaaatcagagccaaggcttgtcaaaacggacagaaagggtttacaccaaagaagtcaatcgaatgcaaacaatcgtggccaattctcattcctcctctagtctcatcacaaccatgggatctgctttcagcgtttcctctaacaagcagagaggcaaatcttcctcaaggcccagaccgagtgtcattttgcctgtgactttacctgtcccctctctttgccacactgtaccttatttctagccccctaaaagtggattgctttcttggccatgttccacggaccttgataactctctcaagaccctcatcacacagaattgcatttatctgcgcttgtgcctgtctatcccaaaggcctgaattctttgagatcctgtgttttgctcaccttggtaatcaggtcctagcatggagcctggtgcataaggtttgcagaattcaatgcaccttcatggaacctgccacacacaggcctatcttttttctttgtctctaagcactatgaagatcatgtctagtcttcatattctaaattcctagagcaatgaaaccataatgtggagtttagagagtgtgtgttccttgcactacattccggatcgttcctgaaggtgctagtcacccttttcccagtccctaggattccatggaatgtccctgctgtgactacaaatgaagatttttatgtaactgaactggtcaattagctcttccttggctgcagaggaagggaaaatgaaaccagtctggggcagatcacccagagcaataacaggcttgctgcgcagtgtcaaatccatcctctgagtcagtacagaggcttgggctgggtgtctcagtcctgggctctgagactcttcacctctctgagtctccccagcctccctggtcaagcacctgctctaaccaactctcagggtgacgtcagcattaacggtgtcgcaggtaccaggtgccaggcataggggcacctagctgcatatctggtttaactatttaacacagaacactcttctcccaggtgagggctccaatgaaacgttctttcttcctcatccctattccagagctgcaccaaggcagcaagtctaaagaagtttaataccacaacaccatcattttaggaaggctttctgtgtgttttcggggtgcagctaggatcagagaactatgtagtttaatacatttttctatgcctgtcaacagttcctaagaaaaagacaatgacagagaaaagtgccaggttctagatctatacagatctagctctaacctccttagctggattgaccaccatcctcaccctctttcatttcatgtaccccaacctccccgaactgccccctgccccagtgccctttggcactccagcctttgcagtctgttccttctcacagcaattcctgtttcccagttctgtactcggagacttgtatccttccttcacaacctttctctgactcattagcaagccagccactacccttagacaagaaacgacataagggcaggtcccaggacctgctcatctttgactggctggctcttggaacattagaacagctcaaaaaatatttgttgaatgaagccaggcgcggtggcttacgcctgtaatcccagcactttgggaggctaaggcgggcagatcacgaggtcaggagatcaagaccatcccagctaacacagtgaaatcccgtctctgctaaaaatacaaaaaattagccgggcgtggtggcgggcacctgtagtcccagctacttggggggctgaggcaggagaatggcatgaacctgggaggcggagcttgcagtgaacagagatcctgccactgccctccaacctgggcgacagagcaagactccatctcaaaaaaaaaaaaattgttgaatgaatgattacacggacaaaaacatctcctgtactccttcaggatggcacttacgatactgaatttgtaatcttttatctgcaagctggaccttttacctgcctctgagttctttgaaaacagggcacgaatttattcattttggttagccctagtctctagcatggtgcatggatcattgtaactggtcaataaatgtttgcagaataaatgaatgagcagagaaatttcatcttggacttttttttttttttttttttgagatggagtcttgctctgttgcccaggctggagtgcagtggcacaatctcggctcactgcaaccttcgcctcccgggttcaagtgattctcctgcctcagactaccaagtagctaggactgtaggcacccaccaccatgcccgactaattttttatttttagtagagatggagtttcaccatgttggtcaggctggtctcaaactcatgacctcaggtgatccacccgcctcggcctcccaaagtgctgggaattacaggcatgagctactgcgcctggcctcatcttggacttcttcttcttttttttttttgagaaggagtttctcccttgttgcccaggctggagtgcaatggtgcgatctcagctcaccacatcctccacctcccaggttcaagtgattctcttgcctcagcctcctgagtagctgggattacaggcatgcgccacaacgcttggctaattttgtattttcagtagagacagggtttctccatgttagtcaggctcgtctcgaactcctgacctcaggtgatctgcccgcctcggcttcccaaagtgctgggattacaggcgtgagccaccacgcccagcctcatcttggacttcttaagcccaactccccaaatccaaagtcatacagcataagatgatattcagaagtaacttttagacctcagtttcctgagctataaaatggaaattgaatgccgtgagctccactaagccctaagattctatagcttggaaaggtcgtaattatcaccatcaccagagcacaagaaatcctgatcaaaagacttggaatttggctgctgtagaaagtactacactgtagcagaaattattgttataggcgctccatttattccaaatgcccgcaaccctttaccttcaagataaacattagggcttcctaatgcacatgtggaactttagggcacatccagggagctggcatggtttcacgtgctttcctgggctgggttttcgcactggaaatcgtgtatgcttttgtgatcgttcagatggtcgagcttctggacactgcagcaaatattgccaaatactcgacccgtggggctaacgccagcatctgagccatgcttattgcaggctcattatcctaagtatgcacgattgcacaaggcttttacaaagtgatggtgcttagtctagttcctacgtggactaagtataaaatatataagctttcaccattcatagctatagcaaacaacattgctgctttttttttttccacacagtctgtcaactgggtttatgagcacgtgctataggttaagcaggatcctgacacagagcaatcaggaaagcaaagccctctccccttaaggtgcctacaatttagtgaagacaaaaataagcagacacatacatgcatatgaaggcacgcagtaacaagcactatggagaaaaatgagacaggcaaagaggaccaacagtgcctgggctgctctgggaagtcttcactttgaactctgccttacgctgagttgtggacgacaaagcttctccttttcatggaaaattatctcctggagtctcaagccctttctttgctatcaggaaggccaaatgaaccagcaagtgtcagcatcatcggaatagaacagaaaactaaaagagtgaggctttttgcccccgggattccagctcacggcccccagtggaacatccatgtcaatctgacaattgtaggaattcaggggacacaggccggcactgctcttttctggttttattttatttggttgactcatcaatgtgtatagtcagttacttcatcccagaaagtatttttgtattgctatagtctccatgagaaaaaattttgatttgatattaatctaacaataattctggaaactgagcatgtgaagctaatatgggtctgtgcacaattatgtggccatttattaagacaaatgccagagtatctaccataggacacatcctatgccaggcgctgtggagaaacagagtccccaatcatgggttttgcctcactgcggcttggagcccaccaggagagggaagacctgctcgatgttaccaagccacatagtaggaccagctaggcttgagccttaagagaggtactgacacatcacaaaggcaggaatggcttcaagctatggggatcaaggctgtcttcacagtggctgttgagctgagatggaacctaccaacccattgctatgtggctgctctagctggaagaatgacccattcccaggctgcgtaaggagccccggcaaaatgtgtgctgagaccaacacatctggggtgatgacactccaagcctgggcagcaagtcctctggcctccccacctctcctctctccccattattcaaagccaccccggggtcccacctggcccccgcaccagcctcctcaccagtcttgccgctcttgtccctgtgctctgagtctatcctccacacagcagcgagggcaattgtttagaaacctccatcagcataagcatctcttgtgtaacaccttcaaatgacttcacccttatggcaaaatctaagccctcaccaatgcaagccctctttgatctgaccccaggcactcctccaacccccctgcctaccaccttcccttccatcactcaactccagcctcactgttcccccaagcaaaccactcttactcctgccccagggcctttgcacgtgtttcctgctctcccaagaatactgttccccagaaaccacatggcgctctcccttacttcttccagacctcttgaaagtcgtctccctagagagccctcccaaccaccccaccgaaatagtcaccttgaccttcctcctccccagtgtctcccatcagctgacttcatgtatgtgcccatcctcttagctattgtctatttccttcaccagcatgcacaggccacgagcgcgcagactattttgtctgtcttgttcagtgcctagaataggcctggcacagagtgggtgtttaatgagtgctgtggaatgaccccacacaggcgagtgggagtatattcaacatgcctttcctccctgctctcatcagcccccgtcagcactcgacttcctcgaaggctgaatgacttccaaatatctatctttgggctggacctcttatctgagttccaggctcaaatatccaactgcttactatatatttctgcttggattcctcagagcctccttaccaggatctggaacagctctgctcttgactcctcccccgtgtttccacacaccggtctgctcccagcatccctcatttagtggatggtgccaccacccacctgccgtggaagccagccctcggaaagtctttcttgagtctacttcccctcagtgccccatccaatccatcacccaagcctgcttggctttgctccatctccacagccatgaccctcatccaagatgcccacacgtccctcctgcgctgctgggcacacacaggcccccccccactgcaccgctgggccctccgcctgttttccatgcggtagccagtgagaccctttaaagcacaaccctgatcacgtcactcctgtgcttgaatctgtggttcactttcctctatgctcgggagaaagactggaatccttcatgtggcttctacaagggggggatattcaaccaggacacagcagtacagctgtgcaggtgttaaatgctgaaacgctccactcctccaggtcagtggccactgccgcaggctcttttttttttttttttttttgagacagagtcttgctctgttgcccaagctggagtgcagtggctcgatctcggctcaccacaacctctgcctcttgggttcaagagattctcttgcatctcagcttcccaagtagctggaattacaggtgcctgccatcatgcccggctaattttttattttagtggagactaaatagttccatcatgtaggccaggctggtctcgaacacttgacctcaggtgatctgcccacctcggcctcccaaagtgctgagattacaggtatgagctatcgcgcccggcctgctgcaggctcttaagtaccccatccctgctgctctggccactgtccccctcccccagaccccttcccctcagtcagcaactacggggttaacatctggtgcagctggttagcacacacatgcatgcacacacacagctctggcccaggggcacgctgtcccagttgtttataatttcaacttctagtttagattcgggggtacctgtgcaggtttgttacatgaatgtactgcatgacactgaggtttggagggcatatgatcctgtcacccaggtagtgaacacggtacccaatagttagtttttccacccatgccctcctcccgccctcccacacccatagttcccagtgtctcctgttcccatctttacgtccctgtctctgtcgctgagtgttgtgactctcgcccctacctgtaagctccagcacaatcccagctccaccttgcctggcttctcgtgctgtctgcactgcacccactctggccttccttcaaccctctgctcctttctctgcctctggggctttgcacaggctgctctctaagaccggcatgttctcccttgcttcaccttatttgcctctgctcctccctcacctcagctgtctcttcctcatggtagccttctctgacctctgactctagggcagtcctctcatatactctctgccttccattcatggttcctaacatagtttttggtatgcatatctgtttgtgtcattatttgattaatagctctcactgccaatagactacagttcagaacggataaggaacgtgactttaaaatgaaattattctatcccttcagcccagctctccatatacacgtggagatgcacaggaagtacattagacacaggcatctaaagtgcaaacaataaattttaaaattggcattcacataagggggttcctgtatgcacacatgtgtgtgttcttacatataaatttcttcttttctgtagacatggtaatgataatgatgatagaacattagtagacacagtctatacaacaaggaactgccctgaatattcagacatctcttatataagccaagagttcctctttccacgctacttagagtaattacttcctattatggcaaacagtacgcattctttccacaaaaacatactatttgaaagtgtgttacttatgtaaggataagtatttgccctgttactgccaccacagtccatcagctcagaagattcaagccgaaagcaaattctcttgccatgaccccgggacaagagcttgcttttatgcgtgttttaaagagcagaaagctctagtagcattaagaggctggccctgtgcacattacgcagatgcaggatcgtcccgctgggtgcattcgtgggtttcatgcaggcatgggttcagccactgcagtccctcccccaccaccaggactctccctgcaacagcaaaaccaaactgccctgtgcaaccagaatgaggttcagggaaccctgaccagctcctttccaggcgcagccacctgcagctacctgttctgctcagccacagaccataaaacagggaccaacagggccacatctggcagctgtgggaattaaccagcagcaaggggctttgcacttggtgtgtcctgtctttcgttcccttctgacgctcatttcataacttgtggcagtgtcctctttaagagagaggccaggcttagccaggactgcagtcttgagtctgaggcaggagcctcccctcagcctgaagcagggctgacagccacttgtcactggcgctgagccaatcggaaatggtgtcaataaagtgcaaataatacctcggtgcttgctgctctctgagcccaaaacgaaccgaagaggtgctctgaggagagaaggcagagtgacaaggcagttacacccaaggcctctccaacgggagaccaatcaggacacagctattccctggtggcatcaaaatcttccaatttcacacagaaaatgagccctggctcaagtctaacacacgttcagttgtccccatttcagctgaatggattcctttgagagctagaatcttaacccttggaaggcctctgaaggtgtgattcacctccgctgagaactgcactgcggagaaacacatctgcaattctccagccacagtaagaacaaagaaagcctccaggtgtgcatctctgcaagcccaagaatgcatcccaggtggagagagcgagcaacccaccctgcctatggggggctggggcaacacagctgcagcctgtgcagctgcttctggaggtgcagtgctaagaaggtcccagaccctgtctcctgaacaactctcacaccaagactctcaccctgcctccaggctttgctgcatccacctcttggcatcaaaaaatgggctgagtttcaacctgctatgcaaaggccagcctggcagatgctttgttagaaccaccacaatgtcctctgggctgtggatatgtggatgttggcatttctgggtggagggatgagaaaaggggcggggggcctggtccttcatccagtttgcaaattccagtcaggtccacatacctcactttccctctgaagtgcactgccagggtctttgcttcttatcacacacctacttctgtttcccatcacataccatactgctccattctttctgatcttttagctgtgaatttctgccactgcaagaccaactgaatccaaatggggtcttagccctaggaatggaggcaggtagtattttgcattttatttatttatttatttattttatttatttatttaagacagagtttcactctgttgcccaggctggagtgtagtggcacgacgatctcggctcactgcaacctccgcctcctgggttctagcgattcttctgcctcagcttcccaaatagctgggactataggcacgcaccaccatgcccggctaattttagtatttttagtagagacagggcttcaccatattggccaggctagtctcgaacttctgacctcgtgatctgcctgcctcggcctcctaaagtgctgggattacaggtgtgagccaccgcgcccggtctattttattttatttctgagatggagtctcgctctgtcacccaggctggagtgcaatggcatgatctcggctcactgcaacctccgcctcctgggttcaagcaattctcctgtctcagcctcccaagtagctgggattacaggcatgcaccaccatgcccggctaatttttgtacttttaatagagatggggtttctccacgatggccaggctggtctcgaactgctgagctcaggtgatccgcccacctcagcctcctggagtgctggcattacaggcatgagccactacaccggatagtattttgcattttaaacaggggcaggatggatagggaaacagtagatgagggggtaggacagaggcatgtcgcccatggaaaacctaacctacgttcagaaaatctggccctgctggcttggaaaagtcacccaagccactaaagtacagaggaaccatgaagacactatgctaaataaaagaagccaatctcaaaagtacaaatatagcaggattccgtttctgtgaggtccctatagtagtaaaattcgtagagactggaagttgaagggtggccaccaggggctggggagtagtcggaaatggggcgttagtgtttaaagagaacagagtttcagttttgcaacatgaaaagagttctggagatggatgatgattacaggataatatgaatggacttaatcccattgaactgtacgccgaaaaatggttaagacaggaaattctatgctgcatatctgaccacaattaaacacacatttttaatggctaagatggtttttaaaaagtcgcaatggataactgtattctaaattagaaacaattagcatgtgtaactaaacaacttaattggcaggcaaatatctacaaacaaacaaaacctgtcaccaatccacaagcccaagccacacacctgttcccttcctggagggtcattgcctctctatttagttagttcctggatctttggctccaagcccgagtctctgccctccaacccaacccaaacacattttgtttcctcgccagccccttctgaagctaaggcttggctgtgtcactcaggagccctggagagccagcctctgcaccagccccaccatcctcaacccgagcccactcgcctttgtcagcacctaacacaagcggggcctcgttcctcgactttcttctcaggctagccgagaacccacacagactgctggtggacaaaggagactgaacatccccactgacacagcatctttcaaaggctcttcctcctgccccaattcaaaggccacatattctaagacaacagcgggaatcaattgcaacttctaagcgaggagaccgcaggggatctgtgcgggcctcgcccacactgttcaggcatcagcccttctctgtggggccctgggccacggcaggagtggaaacagcaaggttagggccttccacaggcaggagccctgggggagttttgaggccactgagaaaaggttaatagaggcagtttcaaagctctcaggaaatggcatcaggcaagagctactcttcagagacaacaggcctgcctccatcccacttacctggttacaggtgttaatatctaccccattccgcaggtgatccaaagctttgtccaagttacctgatcttgctgctctcagaaagctggtagcagcatcggcctgtgaggaaaaacaacaggcggtgagtgtcctgggtgtattaatgacttctccaccccgttcaagtcccaggcccccgcagcagcccctgcatcctctgatgtggcaccctggtgcccacagtgacaccaggtgtgcacaggagcctgagagcccctggttggactgccttcacacccaggcctcccttcctttggttttttgttttttgttttgttttgttaagagagagtgttgctctgccactcaggctgctggagtgcagtggcacaagcgcagttcactgcagccttgaattcctgggctcaagagatcctcccaagtagctgggactacaggtgtgtaccaccaagcccaactatttttttaaactttttttttttttatagagacagggcatcactatgttgctcaggctggtctcaaactcctgagctcaagcgatccttccaccttggcctcccaaagtgttgggattacaggcatgagccaccgtgcctggcccccttttggtatttttataagcaaacgttcttggcttggactcaggaagaatcagcctttgagggggagcccattcctatggcaagcgcacagcacagcctggtgtctccctgctctgaggtttcaggggctccacagtcttgctgaagagtttgcaatatcacagaggtccctggccccaagaatcatgaatgcaggcaccaaaggaaccaagcgtgggctctttggagctgttttgtgtttttgtttctatttgtctgtttttcctttttagagatggggtctcactatgttccccaggatggtctcgaactcctgggctcaagcaatcctcctgccccggcctctgaaagtgctgggattacaggcataagccaccatacccagccctgtgtttttgttaagtaaacaaacagctatgtgctgtcaagtaaacagcacatagcacttactatgtgctaagagccattattagcactttacatatacagtcaagcccatttattcaaccaactgtggatggaaaatttgcaggaaaaaaattaaaaataacaatactaaaataaaaagtaatactaacagaaggctgggcgtggtggctcaaacctgtaatcccagcactttgggaggccaaagcaggtggatcacgaggtcaagagacagagacaatcctggccaccatggtgaaaccccatctctactaaaaatacaaaaattagctgggcttggtgacgtgcacctgtagtcccagctactcaggaggctgaggcaggagaatcgcttgaacccgggaggtggaggttgcagtgagccgagatcgcaccactccactccagcctggtgacaaagcaagactccgtctcaaaaacaaacaaacaaacaaaaaaacccagtaatacagaaaagcaatgctgtacaacaattatttacaaagcacttacattaggtattataagtaatctagagatgatttaaagtatatatgacgatgtgggtaggttatatgcaaacactatatcactttacatgaggtacttgaggatctgtggattttggtatctacagggggttctggaaccaatcccccacagataccgaaggatgactataatatatattcacacacatgcacacgcacagataagcattttatcctcatttggaatacccaagaggtaagtgggattgcagagtcccattttacagatgagtgggctgaggcacagagagcagaagtgccttgtgcagcatcccacagcagggaggaggcacagccaggactcagatgcaggtagtgtggctcagaaattcatgagccgaacctcccagctctgcagccagctcggtctcagctttaacaccaggcgccccccaacagatttcttaaatgagagtgaagctcttctgttccttagctgctgctacgtcacccaccccatgcatctcagaccttgcccccaggaacatctgtttcctttaaagatgagtgacagccagagagggtgagagctgaggacaataaaataaagtttactaattgatatggtttggctgtgtcaccacccaaatctcatcttgaattgtagctcccataattcccacgtgccctgggagggatctggtgggaggtacttgaatcatgggggctggtttttcccatgctgttcccatgaaagtgaataagtctcatgagatctgatagttttaaaaagaagagacccccctgcacatactctcttgcctgctgccatgtaagacatgcctttgctcttccttcatcttctgccatgattgtaaggcctccccagccacgttggactgtgagtccattaaacctctttcctttataaattacccagtctcgggtacatctttattagcagtgtgagaacagactaatacactcacaaagacaaatgtaatgattaaagcccagtcctcaggcattggagtccgtggcctagactcagagccactccactgggtctagctgagtgccctcaggtacttagacaccgttggcttctatttccttatttgtaagctggggagagtaaagcctttcttgtccccttttcatgatgcttaaaagaaataaacagtgtttggcacatagttgcatacaaggctgagttgaaagggtgagagtggtcatatgacaagccacacatgggagaagcgtgtgacgccattcccacagaagacccacagtggcttcctctccacccaggcactttgtctccttcctctacatgccctcctaaaaaaaacatgctgcagtgggctgaatggtgccccccaaaagatatgtccacactcttatccctggaacctgtgaaggtgaccttatttgaaaaaaaagtctttgtagatgtaattaagtcatggatcttgagacgagatcatcctagattacctaggctggccctaaattcaatgacaagtgtccttagaaaagacagaaaaggagaagacacacatgcacacacacacacacacacatgcatgcacatatatgtgtatgcacacatgcacacacagatgcatgcgcacacacacagattcacacacacacacacagatgtgtgcacacaaatctacacatacacacccatacacagacgtgtgtgcacacacatgcacaccaagagatgcatacacacacacgcacacacatgcacagatacacacacctgcacacatacacatgcacatacagagacctgtgtgcacacacacacacacacatgttcacacacacgtatacacacacacagaggtgaaactatgtgaagacagagccagagactggagtgactttagccatgcacaaggaagcaaggaacctctgggaggtggaggctcatagaagaaggccctgaagccctggagggagtgtgtccctgtggaggccttaatttagatctccagcctccagacagcgagagaacacatttccgtagtgtcaagccactaagtgtgtggcgatttgttacagcaaccatgggaaactcatgcacacactagtgatgaccacccttgaacacccttgaacacagaagactccaaatctacagccgaagaccaaatggaactctcatcctcctccacaaagcagcgcttcacgtcttcaccactgaaacagggagtccctagggcatcagcagtagggttctccagccttccagacagggggtcctccctccacactcaggtgctgccccacaccacctcccagcccccacccacaaccccaggcctgcagaaatgctgcttcctcgctctgcctcccagccaacctcctccatccctgcctcacccagccaacctcctccatccctgcctaactggtcttccccaaatcctgacttcctgccagccctccccaacctcaggtcccacatgggccccctatgatgtaagctcaagttcaagtccaagccctgtggctgtctgttcatgaggcacactcatctcgctgtccccacagcggcaggagccccttctcacctcccttgtcctctgtgacattctcatgctctgtctacctcctagcctgcaccttcctcctccctgggccctgaagctccatctccctctggtttgctacttccaatctttcttcccttcaaggccctgatggtggctacttcctgcatgaatgacactatgcttagacactcagtatttgccatctttaaatctaggaaccacaaaacaggagcttgttttttttttaatgcacttaaaatatctctttctctagctattgaattcaggcaagtcttgtctccccagccaaactgtttgcttcttggggcagggaccaagtcttctatctcttttgaatcctccaaagcattaagtgtctgctagggcgaggcctcccttgacctaaagcacatggcattcacatcctaggttcctcagcaaggcatctgtggggcaggaaatatttcagaaatgaagatcaagctgttggctctccaggcatgagctgggtttccagagaaaacccagtcaaggtttagtctctcagataaatgttacttatgctactgattcagaaagtctgtctagattcagttattaggaaaaacactatattattccccaagaataagaatgttaaagagacatttctcccaccaattaactaccgtttatggcacaataataggattcaggctgaaaacctgagaatgggtggataaaaatagactcaatatccactaatgacactgactgctcaaagcactgaatccaggaagaaaagaagaatatttatgacaaactggcagggcgtggtggttcctgtaatctcagcactttgggaggccaaggcagatggatcacttgaggccaggaattagagaccagcctggtcaacatggtgaaaccacatctctattaaaaatagaaaaagtagccgggcatggtggtgcatgcctgtaatcccagttacttgggagggtgaggcagaagaatcacttggacctgggaggcagtttgcagtgagctgagattgcggcactgcactccagcctgggcgacagagagagactctgtctcaaaaaaaaaaaaaaaatttatgacagacaagcacataaatagagggtaagggaagctccatatggactagattgaggaaagctaaaccatttctgttgttgccataatagaatactaaaattataataccaaccattgggacaaatgtattaccagcattatatcttttaattcttataacaacctgtgggtaggtataattattatccccattttagaggtgatgaaactgaggttttgagaggttaataacttgcccaagttctgcagataaatacttggggtgattcaatccaggggtaccccactgaagtctatgcctttccactgcccttgaccccaagggcgttcttggccatttcaagcctgagggtgttcaggcagccctgacaggctggcggctgggcaggcctatatgcctcggccgttaaagagctaatccatggcagaggaaaaatgctaggaggtcccactcaggctctgtccctgagcactctattcagaccaagacaggtctctagaagggaaccatctagttccagcccttcttgtcactgaggataaaattgaggcccagggaagtaaagtgaccggctaaggtcacctagatagttagcagtgaagtgcaattgctaaagctttttctttctttcttctttctttttttctttttttctttttttttttttttttttttttttgggcttctccaggcatagagtagtcaggactctgcaggatcctcagggcatctgggaggtgaactgcagataatgatgccactcccagtagcaactacacatcattcagtttaattccacaatgtatttactggggtcctatttcaggaccaatatcctgctagggcaaagagagaataatcactcagaatataggtccttgctctcttgatctgaataatcaagcaattgtgttataaagcggtcatgtgcattgcatgcacctgtggatccattccatgagtattcattgagaacctcctaggggccaggcaatatttcagctacagagcaaatggcccttgttgggatatgagactcatctttaccatcgtgttctgctgagcccctactgcccatctgtgtagtccaactgctccaattcaatgacctgtcctcagtacatccagcaaatgcaacagggcaggaggcgtgtccaaagaatccaatgtgttccattcaaaacatttacctgagcacatactgacccaaaaaacaacagcaacaaaatacaaacctgaccatctctgggctatgacaaaccggagcagaatgactggccctctccaaggctcatccattcccagatcaggaggccaggaggcctgctcatcctatacagaaaactaccccaccgtgtccacaagccctggccaccagtgaggtgctggcacctctgttgtgcaccccaccaaagctgtcttctggtgtctcttcccctcctcatctctagcttcgttttaatctaattctacctgtgtgcgtgttcggggatctgcacacagcagacattctgctgtgcctgcatccctgctgcctaatcaatgtgatgtccctgaacttcctttcaaaacaaaacaagtttactttcacaaagctctccctaggttttaaacacaccacataaattaattcactccctcctcagaataatctcacaaggcacgtgttttgttatctcctttttatagatgaagtgaccaagtcacagaaaagtaacttgtccaaagtcacatagctaatatgtagcatggccaggatttgagtctaggtagcatacttcttaactattgtgctataccgcttcctgggtcaatcatttcccttccttccttccttctttccttccttccttctttgcctccttccctccttccttccttctctttttctctctctctctttctctctttccttcttccttcctttcctttcttttcctttctttctttctttctttttctttctctttttttctctttctttctttttctctctctctcttctccatttctttctttcaagacagagtctccctctttcttccagagtggtcccccagtggtgcagttatagctcactgcagcctcaaagtcctgggctcaagagatcctcctgcgtcaacacccccttcccccgaatagctgaaactacaggcgtgcaccaccacacctggctaatttctttattttttgtagagataaagtctccctatgttgcccaggctggtcttgaactcctggcctcaagcaatcttcccacctccacctcccaaaatgctgggattacaagcatgcgccactgtgctggcctaatcattttctagtgctcataagggtcctctccagttcagctctggctggagaaagccttctgcctgggtttggaggctgtgcccacgtcaggagaaagggaatggaagagaaggaagggaacagaattcttcctaggaattaagttctcatcaggactgctctgaaagggtggtgaatcctggttacctgagacacccagactattattaaacttgcacttcctgagcagatactaatatagcaatagatggggtgcgagggggctccagtatcctgagagggaggggccggaagcacgctgcagaatgtcaacatgctgtcacccatgagcaggggacattgggaaacaccagcaggcagacccaggtgagagaaccccagggcctcctcacaccttctctgggggttggggtggcctaagttttccctaggacaaatcatgactgacctcaagatttttagtacaaaattcctatctagaaaggcgaatggaaactgagctaatatcaattgctgtaaacagtcataaggcaatgccactttcccaaggggtcttgttggagcaaaatgcagcttctttaacgcagccactgtcagagctctcaggaagagatttcaggtcctttcctgggggacctgcagcccagccagaagacaggcagcagccctgatgtggagctgtctgcttgtgcttgggggatctgagagccgcactggggtatgaggaaagacagctgtccccagccagcatagcctggtagccctgcctttactcccttgacgatggagaaacagaggtgaacactgggccctagtgagtgtgtgttttattatgtttctttccttttgccttccagaaaggtgtgctgttacagctttacaaactgtctccaggctccccagtctgactaccattggcaaaaataaaatgaataagttaaaggtgtcactgaggaaacaagacgcctgagcggaagtgctgggctccctcttaatctctcaacccgaactcgggacattgggaaaacccctggggttccctgtgctgtctgcacccgaccctggaggctgggcagggtgggctgggacgtcactggggaagacctggctgagatgcactgctcgaccacttgatgctgtgctcatctaaggccccaaacctccatttccccattgctaaaatggggatcttgccagggggctgcgagaatcgaaggggacagcggcagagagctccaggcttgccagggcgcccaacaggtctgccttcctctgccccattcatttcctgctacctgggggcctccgggcgcctcacgtttctgagttttaggggccagacgtgccgcaagccaggtccccgcccggcccaaggccgtgcatctcccaccccctgctgaatctacccggccaggctgtcccctggggtgaggggacttggcctcggccagggcccggcccccctcggggcaccccggcggcggctccacgctcccgcccgtgcccctcttccaggccggccacaagtcccgctgcctcccaaccccggctccagcccctccgcggccgcagccttcaggccagaggaattttcctctggatcctgctagaagcctcggcagcagaagggcagccccagcgcgcgcacccgcacccgccggggaaagttggcgccgggcagccgggcgcggagccacaacccgcaggacggacgcagagccccggccccggccccggccccgatccccgcgccccggccccggccgggcaaccgcgacagctcgtgcactcaccgcagggtctggcccggacctgccctgtcgcgctgccatcgtccggcgcccgcgctgaaatccgagcccggctcccgctccccctcccggttatctgctgggcggcgcggggagcgccagcaagttacgcggcatctggctaaaaatacaggcgccctccactcgccccggcccggccctggccctgcgctctcccgcccgccagcctgccgctaatgggatctcttcattttctctccatgattatgtcagatgggaaagttaatgcgaagcgctctccggagagcaggcacctgctgccaagccctgcgaagggggtgcgcgcgggggcgcgggcgggggtgcagccccagctgcaggtgccggccggcgggctcggggcgggcgtcctgcccctgcggaggggaggcacacacgtccagtggaggtgaggagctccaagctgcatggcctccctccctgcctcccgcctccccgaatgccctggtgaatgggccccggagcttgccgagacgtggccggggtgagctcagcaaactctatttatgccccataaccgatttgcatgttttgagctcttccatcgtgtcgtgagataccagttaatcagcctattccagattctgcctgagagccgccagacgcagctgggttgcaggagggcagagctgtcactccccgctgcctcccgcactgctctgacgctggcggttaactagcgtcacccgaggctgtgtccgtgcagtaagcaaccagtgttctgtcctgggaccactatcaccctttcatgcagtcatttcaggggcagatgtcaaaacccatgtttgggattttggagaagactaggggtgacatcatcaagagtaggctcaattcagagggatgagggaaccgtaagtaaaagcagtgtcaggtaactgggcccctggcaatatggcttgttcagatcataggtgttttgtatcataagccggcttcttgctggcttcaagtcacagtcaagacacaataccaaatgctcttttcctctcccgctgtcccctgacattgtacagtacagctgcgcgttggtgaggaactagcacgctcagcgcctattagctgatggacatactgcattatctcatttaatcctcacagccacccataaggtaggcaacactactacagttggataaatgaagaaactgagcccagggaggtaatgggtggagaccaaggtcaccactagtaaatggtgggtccaactggttctaagccaaattgatccaaagccctgccactggccgcaccagcaagattcctaacaatagtgtactcagcgccaggaagagataatgtgggggatgatcttgaaggatcataatcccagcattttgggaggctgaggcggggggattgcttgaggccaggagttcaagaccagcttgggcaacatagtgagaccccctgtctccacaaaaaaaaaaaaaaaaattaattagccaggcaaggtggcacatgcctgtagtcctggctactcaggaggctgtgacaggaggatcacctgagcccaggagttggaggctgcagtgagctatgattgcaacactgcgctccagcccaggtgacaagagtgagaccctgtctctaaaaaaataaaaattaaaaaagaagaaaatactgtgagagtgtgttacaaagccaggtacgcttcaaagctatgcagcaatcagggggcatcccaaggaagtgggataatcaaagatcaagagaaaaggccagggtgttgccaaaaagagggatctgaaatgtaataatacaactcctccccatgggggttaaaaaactggtatttgaagatgacaatgtgagaattctccaggcataagatcctccacagcactggggctgaacttgaggatgggcaccctctcgaaggcagcagcctgtctggatgtaagtcacacagccccttccctccccaggcacatgctgctaaagcccagctcaccctccaggtctctcgccttgtacctctgaaaaccaccttccagatttgctagaatcctctacacagagaactccaattaataaatgatggttactggaacatccctgatcacagcccagtggaatatctcaagggattctaatgcactgttccaacattaatatttagagagagagagagaaaattccccgctcagatgagtaaataatatatataatacttttaaaaacacgaatgcaattgacttgcacaatgaactgaaagagatactattttttagcaactatttgaggattaattgacacactacgagttgcacatttaaaatgtacaatttgctaagttttggcatatgtatatccctgaaaccatggccacataagataatgggcataatcacctccaaaagtttcctcatgcctcttggtattccctgcctcctgccggccagtccacatccttgtcaagacttggtatgatctgtcttaattcagacatcctaatagatgcaccacatggctaattaaaaaaaattttttgtagagaaggggtctgttgcatttccccaataactgataatattaaacacctttttcaggtgcttatctgccatctatatatcttcttttttttttcttttttctttttttttttttttttttttgaggaagagtttagctcttgttgcccaggctggagtgcaatggcatgatcttggctcactgcaacccccgcctcccaggttcaagcgattctcctgcctcagactcctgagtagctgggattacaggcatgcaccaacatgcccagctaattttgtatttttttagtagagatgggatttctccatgttggtcaggctggtcttgaactcctgacctcaggtgctctgcccgcctcggcctcccatgttgttgggattacgggcgtgagccactgcgcccagcttatatatcttctttggtgatacatctgttcaaatcttttgtccatttttaagttggaatgtttgttttcttattgagttttgagagttctatctatacagaatatctgtcttaaaggtgagataaacagatcttacaagtaaaatattcaaagctcagtagcaaaacattcccagtcgcattttggtactcggttcttataattcttaagctgtatctttcttcatattatacaacgctgtgggttatatacaatcacaaattaaaagatgtgatagtcatagtggaccagaagctgaatacaacccacagcactctgagtgtaatgggaaagatgctgaagtattatcagaggactttagttctcagaactgccaagaattcttgacattagtcatgacctccttagggttgaggctttgaaaaacttaggcaggcgatgagtcaggcaaggcccaagaggaggagaaagaacacaactacaaacatgttgctcagtgaggcctgaggctaaaggagctgagatgataaagctaagggagagagcccttgaaacataaattccagcactgcagcctggaatgccacattggagctaattatatggtgcccagtcccaggtgtggtggcctgccaccaggactgaattctaaatgtctcccaggcagagacagcttggttctcatgttccaaattcccagtccctctcccttgctttccccacctactcctctatgtgactggcacagtgccgggcagtgctaaacacagtgattactgactggtgttagaagaatgatgtccccaacacttccatgagtcataaagaaactgtaagtcttggggttcaattgctatggaaaagatttagattccacagaaagaactttccagctataagagatacgtgacttaatagaactctttattcagaaagggtttaatctttgcaggagatccttcaggatggcagaaaaaaaaaacctcaacatttgatctggcatatagaccactgggtaagctgtacgacttggaagggtctctttgggccctagggattcagaaagctaaactattgttcttttccccataactgactgtcccctcaaccttccatcacaaccacacccttagaccacaaataatcatcctgcttctccatctgcattttgttcatacttcaaggctgcacgttttaacgtaggcatttagtgtgctaagaacttgctagtgagatcaaaacaaaccaccagaaaggaattgatgggctgaagaaaaggctaaagactctcggcagacacaggccactgttctagcctgtagcttcatggagtcttcaggcttttcccgtcttgctaaatattttacctactgtctccttgcaggtctctctgcagacaagcataatgaaaagctggaggcctcgcctgtggggttctgtcctctgggccacatgcagctatgccaagcagggatgatgtgggagagaagaaagggaagaaatagactatgcagcacttaaacccccagctcgctcctggcttgatgcagtgggctgttctcagtatagacagggactctgggacacttgatgggctgctgctgctgtcaattcctgcagggatttcacgagctggaagaacacaagcctgcagcaaagaatcccatgcgagtgggattctcaggcgactctgcctccccaggatgatttgggagaacaggtccgggctgcttcaaatggtggccagtcagagacatgaagtggctcctctctacagggacatcagagctgagatcagggcagccccaggattcgagagaagggcatcctggcagctcaggccctgtggcaatgaccgtcgcgcttaaccctcctatgcaatcaactcaaacccagaactcaatagcaacaacactatttgctttctggacagcctcttaagaggctctaaatcagtaggtctcccacaattgagctgtgcagcttttgataaaggaaatgacttttctgagcattgatttcttcatcagtaaagtgaaaatagcttcacccatctctccaatattgggagaataatgtaaaatgctgaccaccacttctggcacatttggtaagtgctctatcaatgacagctgatgctcttttttcctcctcccctccatttcttctcgactaaagcttttgtcaaaggttaatgtctcccccagaggtgtgggttgtcactgatcttgcttcaacactggaaaatcaaggcctcatcactgcttacccagggtcaaacatccatggtcaagatcaggatcccaagaaatctcaaagctctaccctgcacccagacctcttgggcttacaatgcacccttttcaatgcccatattctctgcagcaaagaaacaatgtgtggactcagttgtgcccccacgctccctgtccgcagctgcccttgcagtgtcctgctgctggctgtggccagctgacccgttgggctctcctcctgaccctccttccatctgttccatcctcacccacccaaggagccgcccctgctcctagagactctgggcaccactgataagggtgggtaccaggaactccaccctttaccgagaaaggcaggctggtttatcgccactcagacccagccagcgaccaccctggggagtgtgtcagccaccaggagcatcgctgttggggaaatgttattaactaggaaggaactttacagaatgttccacacaaatgtcacattgaattcaatcagaaatccagcctgaccccccctaaacctggtcattccttcttaaccttaatggcagtgacagaagaaagggagagaggaatggagtcttggttgtttttctatttaactttgtgtagggagtgcccagtggtcaattaaggtgtcctgggcacccggcctggctggagtaagggatggcaagtgcgggggtctatttagggaggtgatcagagcccggatcaggccccacagagttggcaccaatctccatcatgttctttttaagagggttggcagccctggagtctatttttaaacccatgagaaaggtgctgtgtggattccaaaaagggccaacattaaacccgagatccctggaggagggagggaaggggggaggcacagctgaacctaggattttctcttcacacacacaggggttccccttattcctgggatcagatattgactgtccttccaaagggatctcttgggttacaggcccactctttggcatggctttggtggaattcgactcctaacgagctcgtgagttggaaagggttttgcacaccgggtctctttttcagaattgagatttttttaaatccctctacccccagtgtgaaaactccatgtgcttttgatatatccggcatctcccccttcttcctactttcaaatcacatgttctggaacccccgctccctcctgcatgcactgcagagcccacagccgagaatctacaacaggaagatccaaggaaagtctaagttccccacggccacggtgcccagctccccagaaacccagtcccggtgctggagaaggatggggagtggacccaagtggcaagcctgcgggggacaggattattttcccaatagtgagaaataaacaggcatccaaacgccactgtttcccatcaaataaccagatgaagcgaacagaatgttttatgtacaataacaaatttcagcttcagtatctgtgtctctttttggataagaaatagaaccagaattcctaaagaacaaaatgccttgagattaagcaaatgcttctgctgaatagttctgggaccacccaggaccccctgggcagggaagtaggagacgaggtctcttctcatctccgctcaactcagaatccccaagcctagcacagaagcaccactcaatacatgtttcctgagcagaacatgatgcagttttgtgccccatgtcaaccaggtaggagctcccaccagtcatgctgaaaacaacagacatgagtttaagcacaatgctggccgcacaacagaggctccataaacgttagctggattggaatccagtcaactcagatttctaaatgaatcagatgttcggggctagttgactaaattgtcaatgtccccacgtgctattatagcccctgtagaaacagcctggggaccactgtcctcttctgggcagggaagtttcaggtgcttcccatcccagggccagggccgtgctgcagaaaaaagcctccacaccccaacctgccctgcccatcctttccccacaatctccattagtcctaaattgccagtccaagcccaagagagcaattgtttcctcagtcccaaggcagcgaagcagacagctcttcaatagttcacatctttctgctgagggtgggaagatattggggtgtcttgtgggtgcctaaatagaattccaagtgcacccgcatcaccaagcaccctggcccacgccgcagagcatgccacatttccccactgcgcaaggaatgggctgcatttagaattgacacttcagaacatattgtggactggggagccgagactagagtggaattacacacattttggaaaatgtggatgagcggcactgccagaatgggcccatttactaaactacctccagtgtttccaaacattagggaaaccttcctctgcggcctgctggtatgcgaggaggaggagcacatactggagaaaatgcaaaatcaaaatcattgggaaggtgctaatagggaaaatagggactcttcttttttttttcaagttgccaaacaggcttaagtactggcagtgaaccccatggctccagagtttctgaaggatgcccaggcgttggacagccctgcatggcacgctcttcctcagcaatgaagaaagattcccacccttccttagaaatgcaactttgcctgatataagctgccatctggagcaggcggggccgaccagggggtaccctgagactcctcctttatttgaacaatttgccccaagggacagagccaggatgggtggcccattgccagccagagagacctgcccaagattccagaggggcttgtgaccctgaaatttggggtctgtgcccctggagtttgtccagcctctggagcaaggcttcccttacatggagaaggtagccttgaaccatccattgggaactaggcctggaaggccccgtccacaccctctagcccatgatgattcaccgcagagacaatgagatacagaagtgagagcaggaagggggaactgatttgaagataataataataaagctacagttagcagggcatggtggcttatgcctgtaatcccagcactttgggaggttgaggcaagaatatcacttgaggccaggaatttgagaccagcctgggcaacatagcaagatctctgtttctccatacacacaaaaaattaaaattagccatacatggtggtgcgcacctgtagtcccagctacccgggaggctgaggtgggagaatcgcttgaggccagaagttcaaggctgcagtgagctatgatcctgccatggcactctagcctgggcaaaagagtgagaccttatttctaataataacaataataatagctacaatgtgtgagccaggtattgttcaaagcatgttagatgttaacacatttaaccctcaaaaccaccctacgagttaacagctattattattcccatttgacagaagcagctaaggcacaaaaacattaagtcatttgtccaaagtcctccaggagtaacatgatgcctgatgcctggggtggtgcatgaaacacagtaaaggggctggccctgggctttgcaccattctgcaacctaaggtatttttagggtagaggggaaaactgaaattcaatattctccagtaagagttgctcagtcttggaaatttaggtgcaaccggggcatctttaataatgtggccattctctctattcagaaaaaatgccagccaccaatcactatcacattcaatgcagaaatgtgaggtatctgtttccatgaactaggccctccagggtttaatgagcggggatctgtcctttccaagagccatggagaaatggggaggccttgaatcaataatcccagtccactccaatcgagttctctagaattacaacagtaacatcgtcatgtaacctccattgcacacttctgaaccaagagaaagaagctccagggagctggtgctacgtcttcccggctggcccacaatgatcctagactccaagaaaggataatgaggtagaccaagcccaggggaccctctgctgtgaaacccacttcttcgccttcattggggccctgctgataaggggtggcttccactggctaaatgctgactgcagaggtttcctctctcttcccagagccaaaacattgcaattaaacccaattaaactactaactggcctacctatgcctctttaatttttccatttgtacaacttaacaacaggaagacaggatccttcctccaagatgcacttaagctcctttcaacggggtgcttagcagctaccactcgaaaacaccttggcgtcagccctcgacttcctagtcctgttttctctttactaccaaggaaacaagagcaggtgtcacacataatacttcacacagggctcatcgtattattttaataattgaagggaaccattttctttctgtttaatcctcttatgaattctggctggctgctctttcagatatcttttcatacagtatttatatcaccctttttgtaactatttaaatttaaaaggtgaggaaataagctctaaactgtcaaccctcagctgcatttctttctacgttgcttatctgcagaaaactctgcccatcccaggggaatcctaaggtatgtctctaatctgggtatttcttatctgcacaatattgaagggtgtctagggggccccctcttaaagccttggcttcatgtctttttaaagaaatatggctgggtgcagtggctcacacctgtaatcccagcactttgggaggctgaggcaggtggatcacctgaggtcaggagttcgagaccagcctggccaacatggtgaaaccccatctctactaaaaatacaaaaattagccaggcgtggtggcgtgcacctataatcccacctacccaggaggctgaggcaagaaaatcactggaacccaggaggcagaggctgtagtgagctgagatcacggcactgcactccagcctgggccctgggcaacacagcaagactccgtctcaaaaaaacaaaacaaaacaacaataaataaaaacaaacaaacaaacaaacaaacaatgttatggttgtgttggcaactttctttccagctctgcagttccatgaattcgtgaagtgaagacctcatttctactctaacatcagtgctgaagtccactttcataatctccttttcaaagtgacctgtctcagcactcgtgaccttgaactcctgaataaagggatgtcaagcattagagaaagaatgaaaaatgcacagtgaatctagtatcaaacaaaaacagccagcgcatcatttctggaatgactgagttttagccttcggagagagacatttccaggatttctgaaataagataccaagatgccaatcaacatttcctaaggacaatcattaccaatatccacacccgcctctactgcctcaagtgcttttcgggtgagggtcacagagataaagtctcaatgcaaaaattcggtgggactagatagataggctttttcctcattcatttattctttcactcaaatgtgaactgttgaattgcattgtacaatctcagcacccagtggtagacacaaaaaaagtaaaggctgtttggttcctactcttgggaagactgcaaactaacagaggtgaaagatagagctgtatgaaaaataggacaataaaagggtcaaatactcagtaagataatagctcaagagatgccccaagacagtgtgcaattaaataccaaacgagaggttgcaacaagaaccaccaggagttcaagggagtggctgagatcagagagggctacagcactgggggcatctttgatggagcagtgagaattgaacagaatcttcaaagactgccaggttttaggaagttgtggggatccatttcaataccaccaatgctttttcaaaggccgctgtgttccagaatcttcttgattataaaagataatcagagaacacaggcttcctgacctcctggagagaacgtgtggatccagaaccaaacgcttgaaaattaaaacatgtatgttagacaacaacataaatacgtctattgtaggaagctgtgtgaatgttatgtaaaggaatgattcgttgctaacgatcgtatagcctttacagcattaaatgtctcccgttgtgaggttggagggagtttccatccctcacaaagattttatacaaagaggaaaataaagtgatgatttttagatttattcagtcatttaaaaattatgtgtgtgcctgtggaggggtcaggccttgtttaggatccgacactgaacacacaggcaggaagcccgcgctcatagagctgacattcctatgggagggaggagagagagatagaggagcagtaagatctatttatcccacagggaagtggtgagtgctaagaggaaaatcaaacgtggagtggggatggagagggctgtggggtgcagtacccgatggtgttcagtcccggaggcctttatgaggaggtgacacttggggagctggatgcaggcagggataaggcagcagcacctggacatgcccaggctgtgacaggtaagctccatgcagtgggagaccactctagtgccccaacccatccctctcctatccctgagacatgccccttgcttggtctggaatgcccttctctacacctacagatgctagacaacttttttttccctttctctcactctgttgcccaggctggagtccagtggcacaatcatagctcactgcagcctcgaactcctgggctcaagagggccttccacctcagcctcccaagcagctgggactacaggtgagcaccaccacacctagctaatgtttttcattttttttttattgaaatgaggatctcactatgttgcctaggatggtctcaaactcctggcctcaagtgatcttcttgccttgggctcccaaactgctgggattacaggcatgagccactgtgctcagcctctagtttgatgcccatgggacaagcagttagaggcactggtggaggaacaaaagaaaaaaagaaaagacaggaatcaatagcattttaggaggtgctgggcactgctctaagcattttacaagtgttcacccacttaaccctcacagcaactttataagtcaggtgttctacttatccttattttacaagtggaaaacagggcacagagaggttaaaaaacttgcccaaggtcacatagcagagaagtggcggagttaggatttgaactcagcaaccggagccaagtcggccaccgcaagcattctgcttttgtgcctcaaagacgcctgtgcagcaacaagaagctcagaaattctgaggaagtaatggttaagagagacatgggatctggctgggaaagccatgagacagagcctagggaggttcttggttctccaccgacagcttttgctacagagcacggtagccccttgttcaggccactaactctaattagtattttgcatttgccaagtgcctaccctgtgctgaggccaatggaaggatgctgaagtcagtgacagctgacatagtcctcccagggcctccctaggaactggcctgggatgcaactggccaatcagaccagacagttggcctgggttcacttcttttagaattttttttagagatggggtcttgctatgttgcccagtctgggttcaagcaatccgaccacctcagccacccaacgagctaggattactggcacaagacactgcacccagcctcttcttgatttttgaccaataactttccattatttcctcttagactccagttgaattcatgaatagcattaacatttttcaaatgcccataggagtttgttgagttaacctgagtgactcaccagagagccttcagcttattctcctcttctctggggggtgagacgtcctcctctgcccacccagcgggtgcagaggggaggggacgcttctccctcagtagattcttccttcctaaatgggccaatgtgtctcagacactgagggtcagggtgttcctggagtctgaggccttggcagcgctggccgccaagggaacatgtgttccatgggccacccggagggaacatgtgtacacatgtgtgcatgcctgtgtgtgcacgtgtgcctgtgtgtgcatgcgtgcatgtgtatgcatgtgcacgagtgtgtgcatgtatgagtttgtatttgtgtatatatgttctcgtgtgtgtgtatgtatctgtgcatgcatgcatagatgtgtgtgtgcacatatcaaggcaacttcagacaaagaaaccaagagtgggtcccagggggttagtttctggggctggggacagggttgggggagaggatgacaaggaggatgcagctgggggtggggagagaatatactacaaaaagaaatcaagagtggttctggcatttaatttctaatctcatctcactagaaaacttgtaaaatcctcaaccagaagtgctaaagagaaacgtctctgcctggttcttctacatttgtggaaagtctccctctctggaaaacagtcaccactttctgctttcactggggactacatttggaaggctggagagaagagctgaaagccaacaggaggtcttgctggtgatgtggagtgggttccatctgtggcccatgcaccccaaagcctctccagccacctcaatctcctggccctctgcagtttctctaaaacgtggcaagctctggaccacacacaagcccaacagccaggactccctgctgagcagccattccccaactggaagggctaccatgccaggcaattccgagagacgccttttaggcagaattcacgagaatctgttctcgccccagcacagctgtgcacggtgcctgctgcgtgggtaccacacccagggaccaccttcccaggccctctcactgtattttcaccaccctgccctcccttctgcagccatctacacacactgctgttgtcttctgcagaggaataagcatgcctcagtccccatcccagcaagagcaggaggcatggcagaggtggcaccagagagcacatcccctgtggcctgggacggaccattccacagtcaccccactggagtctgcacagatggctcctccctgcccttcatgggaagggacggagctgagggcacagagaccagcaaccaacagacccccgactcagggcggtgacccagggccaggagggaggcagagggtctccaaggccaagagggctgggggcacaggtcagcttcagggtccatcccaggggctggtactaggagagggtggagagcaccctgcgtgagggctgggggtccctgctgctggcggctcccctgctgcctcacagctaagggtctatgtcacagtcagggacagagcgccaagaaacacccctggccaaactgggaatggagctaagtaaacccagggatttaaataactgggatttttaaaggctaggcacaaaacaggggtttgtgacaatgtgcagagccctccatctagaggaaacatttcttatgtgcctgacaccagctccatctcacttgggcccggggccctttagcaagggttcctgctgccacaccccctgccatggggccaccagatggaaaaataactgaatatttccatagagagctttgaaaccaaacatgcaaactcacaaggccaaaatgcatggccaagaagaaaacgcagaggtttgttgcaaaggagcccaccgtgttgggggaggctttgcctggcatttcttgggtgggtatttcaaacagggagagtaaagctgctctcctgcaggtcccttaatgtcaccctctgcgtctccttttacctatttgccactaagcagcaagccactgaaccattccactccccagtttcctccccaaaataagatcttatttcccagagggagcagcgtacggactgagtgagccctgcatccagcaggtcttcccctaaacattgtagagccctccgtgcccccaggtaattcctgacacccagaaaggacggggccgcctgttgagaactgtctcagggggtctcagattctcgctgaattgaattctaagcattttatttgaatcaaaatatatcacattgcatacattaatgtttacttcatcttatgcatttggagttagagcctctctaatcacctatgcgaaactaagtaagcaaggtgtaaatctggatccgaaattagatgaaaaaattccatcctgttcagcttatcaaatttcaagtatttcattaacttgatcattagatgctggctgatcagaaagtcccaagatttctaactactgtaatctaaatggtataggcgtttctaaaatatccacactgaaaaaaagctcctttgctcatcccaaatccatttcatctgattgaatgattttctcatttccacagagagctgttaaaccagccaagcaaactatcaaagctccgcaggcccaggaggaggaagaaattagacgacatttggataagtcagttcttagcaaagtagtagtgcacctaattaagtgaatgcagcgcatggggtttctgtgaaccaagtcctatttcctctgagagttgtctaactggtaatccagtcattgaaggagatcgtttcgaaagtctcccaagtcctactcccggtccatgcaactgtccctcctcccaaattatccacaagactctgatcaaatacttccctctttggagaattctaatttttggaaagttctttctcatctcaagttgaaatctgctttcctgtgacttctaccccaccctttcccgggtccttccctggagcaccaaggagtgaatctctactcttgctggtagcaacctggtgacaattcgggactttttttcagccttttcagtattctcttttcctctgttcctccaaagtttctcccaggcatgcagaaagacccttttcctcattgaacccctgcctacgtccatccaatgatcaaggtctctccaacaaaggaaaatctgaacgccatcctcttaatggagactgacactgcatttcccaaaatgtgttcccaggaacaccagccctgtgcaatgtcacccacaccaatccaaagggtgctctgggcaagtaaatgtggacaatgcaaaccttgtccttacagagtcacaaaccaaggaagcatattacagccctgagcagggccaggtatggtggctcacacctgtaattccagcactttgggaggccaaagtgggaggatcatttgaggccaggagtttgccaccagactgggcaacatagcaagactccatctctaaaaatattgtttttaatgagctgtgcatggtggcatgcacctatagtcccagctacaggagaatcacttgagcccaggaggtcgcggctgcagtgggctatgattgcatcactgcactccagcctaggcagacttggtggcatcgcaagaccctatctcaaaaaaaaaaaaaaaagctgtgagcattcttggagaaactgattaacagtgtttaagccaagattccataatcgcatttgactctaaaactctttatttcccccacataacacacttagggaaaggatggttattttcactctgaccgagctttgaacacttcactatatttctctaccccactctctcacccccactctctctaccccattctccactcctagcctcctggtgcccaggaactaacaccatcaaaacaaagaactttaatgcaatagctctcagtatttagtgaattccttcttaaagcaaagcatccttttgggatagaattaatcaattccctaattttctggctttgtaaatgtgaacgttagtatattaagtattcaccccttcaataagatctgtaatacaattcaatgctaccacctaccgcaaggacatttttcaggtaattgatgtttgtcattaaattcactgacaaatatgaaaggcaaggagaaaactagaaacattttggacactttttatcatgcatgtataactaaatctattcagttaaagcttttttttgccttccacaaacgtttttatctataatatttttcatatgcacttgggagctaattactgaaagaaacctcatggtgaaggttttgcaaattaaacaaacatcctgcaatgcatctgggctttgaatcttgatgcatgcacagtttttgaggtggttttgtttttggttttctaagttcagaagaaagccctgtacatagtggaacaaattatgttccttcaacaaatcagcgtttcttgaaggaatgggcaaagcaggtgatacaaagtttccaaaagatgggccttccccaggtcacacatgtggtcagtgggcttccaagggttccatctgaaatgctgcacaggacctggaagagcgacgctgggctttgccagccctcgagccccggcttctcctcttgagtctcctgtttctgcccctcagatgaaagcagaatgagactgggcatgatggctcactcctgtaatcccagcactttggcaggctgaggcaggaggatcacttgagtccaggagttcaagaccagcctgggcaacacatcaagacctcttctctacaaaaaatttttaaaaaattagccaggggtgtggtgcatgactatggtcctggctactcggaaggctgaggcaggaggatggcttcagcccaggagttcaaggttacagtgagctatgaacacaccactccactccagcctgggtgacagagcaagaccctgtctctaaaagcaattaattagataataaaaacacatgaagcagaatgagtttgtgattaaggactctgagtctagggccagcttgcctggcttcctgccctagtccgcagctgtctagctacggagaggtgagtaaatcaatctctctgtgcctcagtgtccttatctgtagcctgtagtgacctcacgggataactatggggatgaaatgcgctcctgcctgcatggttcttagatgaggcctggctggggtccgaccttcccctcttgtgggtgtggtcactccagtcccaaccactgctgcccctgctcgctgcgcatccctgagggtctccatcacttccgggcctgggccttcccgcaggagttgccgaattgatcttgcggtctccaggcttccttcctttccagatcactcactgcaagggtcctcccgctcagagccgtccattgctcctcggtgctttccagaccctttaaacaccctggcggagccttgctcggcccttctgggtccacttggtagccgagggtccgagctgacctcatgctttccgcactgtcgggcagcgttgtcatcagcggtactctccgcctgggaaccctcccgcgtctcttctccctgtactctggagtgccccttacagccaacttaaaggcacctccctgcagatcgtcccttgattccctccgatgcagttttctctcctcctcccgagtttccaaagcattgtatcttgtagcaggttccttttggcgcggtttgtggtcgaggcacagcccatctccccttccaggctcttaaatgcttttcagagcagccaccacagactctgaaagaagaggaggagctcgcgtcttgccaggggctaggaattaggaacatctcagaggggggctccctgtaggagtcagggctggaggggcgtctacaggcagccctgggtgttgcccctgagccctgagagaaccttggggaccctgtagacaggctccacccaggtcacagtcataatgcccctgaggagaaagcatctttattggtaaagaaataaacaaaattagatgcaaacaagtaaagcaaagatctttcaacaacaccttcaggctgccccagccactgctggctctgaagccatcccatttattcaaaggctagggacaagcccccagtggccacgttgcaaactaatggagtcgagagaagggctcagaacagttatcctaatcctggaatggctatttaagtaccactttgtgcctgagacattcggagcaatttgctaatcccagcccagcactcaccaccaggcccctttgtggtggtcggtgccacacactagtgtctctgtttctcagatgcaggcatgaggacactgaaaacaagtgaatattcaaaactccgcaggaaaactatctcgatggagcctggaaattcaagcctcccgatttgccagttcatcctacagatgctttttaaccaaatctgagaaacacagtggttctaatgaaaggctgtttctatggcagattccataaagagaaaagaacaaaggcagtgatggaacaagttcccttcaacgaatcactcaacacagcaaggttgacatgttttcatggtttcccacacactgaagtcagagtgggtgtccagtggtcattcatttttccactccacatgtatttatttagtgccagagacgtcccaaagcacagagggatgcctgatgggggccatggccttaaggggaccagagggtgaggagctgggaagctggactggagggcaggccctggcctggcccagaggggtgggctgggcttggacaggggcagggaaacagtggtggaggggctggaggccagtggagacgagcagtcatgctttgtgggtgattatataaaaaatgtgggaaaagtccattctggctggtgatattaaatggcaattcacacccatttggtaatgaaaagcctcccctacctatggcttctgtgtagtagaaagagctgggcttagaattcacacagtcctaggtcagaccctgccacttactggctctctgacctatatttaatggtgacccaccccccaacccccagcccaacctgacaggggtagctgggagagataaggaactggaaaacgtgtggtatcatatgaccttctgagaggtaaaccagtgcaatcaacacagagacatagccccagctagcttcaaacatccttgaaaaacaggatgtctcttaagtaaatagcagtcaaaacatggctcatctgattaaggctaaactaaagaaggagacagaaagaagaaaaaaatagccaggcgtgctggcctgcacctgtagtcccagctgaggtaggaggataacttgagcccaggaggtggaggctgcagtgggccatgaccacagcactccagcctgggtgacacagtaagaccctgtctcaaaaggaagaagaaagaaggcaggcaggcaggaaggaaggaaggagaagaggagggggaggaggaggaggagaaagaaggaaaaacaccagtgacctagaaatggctaccataatacaccaccctgccccccagtacccctggcagaggttgctaagttatcacagcactcttgcccataagccttaaagtggcttcagaatctctcaacacagcatcccagacagctgctatcaatcggattggcgttgacaccaggcagtgagactcattttctattccaatgttgtttaatcagcaatttgtaacaaacacagtgctcttggctatggggcgtgcatgattcatcaggccatagcacagtctcgatgacagattcaagacgatgtcgcctcctgtttctctgattgcgcccttaccaggacattggttgtgactgacttgccttttaggttttcttattaggacagaattcactgaccggagaacacaagtgaacaagaacacagaatggcagaggaccggaggagtcagatttctcattgtgaagtcggagtactgacgtgaacaccagacacctgtgaggtgcattaagtcagtttccaaacctgctatcctctggttgtgtctcaaaatcaagttaccagaactacatctcagaccacaagggcacctacacgaccagccagtcaatatccccaataaacaactttatttcatcactcttcctagctgcaatctcagtttcctcatctgtaacatgggtaatttttatgtggccactgtaagcattaaatatgctgcgatatttaatcacgtagcatggtggcgggtacaaagtcgctactcaagaatgttcatgatcttccaatcccctcgatttaggacctcatcaaaccttactggtagaggggcaatattttcactccagtgacccctcttcatcagccctgccagatgggggctttctgaagccctaacactttcctactcagaaagctttgtgggcttccccaacccctgtggactaaagaccaaagtctcaggctgacgttcagaaggctcctcaaaccagctcctctctatctcttcatcctcatctcctactctgtccaccccacctgtccctcaacactggatcctacacctctcccaaacacacaagccacacttttcatgaggctttctctgttttgtgaaattctacagattcttcaaggcccattcaaagttctcttcctctgcaaagcttccctggcacactctcttgctttcctggccagagcgttcactcttccctgtttcagcctccatggtattgttcgaatgcagcatttcccacttcctgagaacaagagactgtgtgatttactgtttcctattccatactttctgttggcctgagtcaaaggtgcgttaaaggtaggaagatcttctttaaatttccagagttcttagaaggttaagagttattgatccagagaagaacctgtgatttcaaaaaagtttataatcaccgacttttcccaaaaggctggctctgatttcctgtgttgctcacagcaaccccagggcaaccacgatggtctttggtttccaggtgcggactggagatgcggggagggcacatatctgatggaggataaagtccagaaagcagcagagcacagtttggaggtcaggcactctggctgcggtgcccacaagctggaccatgtgctgtgctgctgggcccctgcggtcacactgccagcctcaaggccctgtgtggacgagttcacctgcaccaggcaatctggacattgggactgaagactagtggggagacaggcatctaaataacagtttcagcacgaccagtatggtgaagagtgtctatattagagagttaggagacagacgtgagctgggaacctcgctgggaaacataggccaatcaattaactgttcaaccctgtttcctcatctagaaagcgaggacactgtcacctacatcccaagatagtttcaataccacgttaagatgaaatatataaagaaagtgctgtgcttcttgtatggtaaaatgatataattccacacacaaggtttgaaaagctggtagaaaggcaagggataaaaccccggggacctcaggccacacagtccagccaattcctgggctgaacctgtcgccacctggatgacacgtttgtgaagagggtgttcagaatctgggcagttcctgtcacccgcctccaggtccactgtaagtcccacatcactcaccaaactgcactctccatgctgtgacaggccagactgtcctagggtatctgaccacttggaaaggaatctttttttttttttttttcagagacagagtttcactcttgtcgcccaggctggagtgcaatggtgcgatctcggctcactgcaacctctgcctcctgggttcaagcgattctcccgcctcagccttccaagtagctgagattacaggcacccactaccatgcccagcgaatttttgtatttttagtaaagacgtggtttcaccatgttggccatgctggtctcgaactcctgccctcaggtgatccgctcagctcagcctcccaaagtgctgggattacaggcatcagccaccacacccggcctgggaaggaatcttgagcccagtcactatcctaagtcagggagctcagggagctcagggagcgagcttccccttccctcctaaccactgcaccaacacctctgcacctcccacccccaccccaccaattcatgacctgccctgaatctcactcctggcgtttgcctaatcctcaactaatcccactaagaactagttccctgcatctgtacaactcgagatcctattatacagctttaaatgcatgcaattaatagaagactttgagatataaaacccctttaagaatttaaggaataatctctgatggcggaactttagactttctggctaatgggggttgggggaggtattcaaagactacgaagacattctggcatcttcaaatcacgccgtgtagacagaacattagccagtcccaagcgggacttagacatgttagaggttagacagatgggagatgagggtcctctagccattgactccctttggagaaaaagcaaactacaggtacacaccctggcccagcccagctcccccacccagaggagaggttgccagagtgggctgacagcaggacagagggcaccaggtggctgcacaagccgctaataggttttctgagtagctggaatctgctccactgtttgcaaatcatcatcaccctccatcaatggctgcgcccctaggtgtggagaagggctggacctgtgccagcctcttttcagcttttctcagtactaactttgtttttttttttttttttttttttttttgagatggcatctcactctcagctcactgcaacctccgcctcctgggttcaagtgattctcctgcctcagcctcccgagtagctgggattacaggcgcctaccaccatgcctggctaatttttgtatttttagagatggggttttgccatgttggccaggctggtctcaagctcctaacctcaggtgatccattggcaggcactaactttctctctctctttctttctttttttttttttgaacggagacttgctctgtctccaggctagagtgcagctctgctcactgcaacctctgcctcccaggttcaagtgatgctcctgcctcagcctcctgagtagctgggactacaggcgcacgccaccatgcccagctgatttttgtatttttaggcagggatggggtttcaccacgttgaccaggagggtcttgatctcttgacctcgtgatccgcccacctcggactcccaaagtggggaggcactaactttctgaagaaaactgaaaccaggtgccctttcttccaaaatattgcttcatttcccacatctggaaagggcagaacagtgttctgaccaataacaccctgggggagggccacagaggctccccgctgccttccagacaccatggggggcccagagctttctcaggaaggaaaacccttccaggcgttcctataggagagaagggctggggtcagaaggttgtttgcttgctttgtttttcctaatctgtctataaacaagttttctgcacaggcaacacaccctgtctcattcctgcgccaccttcccctacacgctaataggtttcagcagctgctcagccgggcccattagcagcagtcagccttcctcctgtaatgcgcttttcttcctgagcccccacagtaaattcaggagataaatcagcctctgctcagagagcagcagccgaggggagggtgacagtcaagggtgagcgggaggcagcagggaaaacaatgccacttctcactagatttctaattggttgtcactgcctgtcggagaatgatgacaaacgccacacttgccctgagagggctgcagtccaggctgggctgtgctgagaaacctcgtccggcaggggtgtcaggctgtaaccacctactcccgcacggggccagcttgcaaatttattttccagaccttcccgacatcaattggcccaacattttcctaacagccaaagctcacgatctgggcaagcgaaggagaagcaggagctcagactcattcatgggtttccaattaattcacttaacaaatctatttttcagccccaggttcaagaccttggtcgaagccagggaaaataagaggaagtgactcaaagatgagtcagatggagctgttgcccgcctcccgcccgctcacagcgtggaggagagatgacatatatataaataagcggggaggtgtggaaaatgaggagggccctgagggaggttctgatgaagtgcaatgagagttcagaggaaggagaaactattttatgaattttaaaaaatcccaagagcagagtatctaaaaagtcatccacgcaaaccctagagcaataattttcaatcgcaggtttgtgagcaaactgctaagcagtcatcaaccacgaggtgttctgcaaataatttactgttcattcatgaatgcaaccaacatttaatgagcatctaccatgtggcaggcactgtgctaagtgccaaggacacagcagtgaacaaggcaagcctgagtcccacccatgtagagtttctgaatattatataaaaatgtccaagtgcagcctgttgaaggaactgacagtgtcctggagcaattattgtgggagttctgaataagaagtagtccagggccgagtgcggtggctcatgcctgtaaaccctgtgctttgagaggccaaggagggaagctcactggaggccaggagttcaagactagcctgggcaacatagtgagacccctgtctctacaaaaaatacaaaaattagctgaacgtggaggtgcacacacctgcagtcccagctaatctggaggctgaggaaggaggatcacttgagcccaggagttggaggctgcagtgagctatgcttgtgccactgcactccagcctgggcaatacagtgagaccctgtctcaaacaaacaaacaataaaaaaaaataaatacaacagtgcaggatcaggacaggaggcatctcaggaaggagtctacactgtcctaagaacactgtgaagccactgaagatttaaagcaagaaagtgaagtggtaagatttgcccttctaaaacagcactttggttgtgtgtgaagaatggattagagggagtgagaccacctgtaagaagaccactgttgctttttaaaacttagaacacattcaaggttcccctctatcacagctctgctcttgcacacttacacccgagctttcttgacagctcatgctccagaaccttgttccgctttatccatgccaaggtcccaagaagaccatgaaggatcttctgcagctgtgattgcaaattcatatactacatatgaattgtgattttatagtggctcccatctccttttaaatataaccagtggtaaattattaagtagggagcatctatggcactattttctcattaaataggaacgtgtaagagagagggggattattaatacccaggtatagccatgaaatatgtcatgcagaactatgtcaacaaccagccctatgtatcccagagggaagcaagttgagaacggttgtactacaattgcatgataacaccatttgccacactatatcaggtggtttaatttggtagcccatccctacaaaacgtgaatccctggtttcaaaggcattaggaagtcataggtataggcagaagtcagatggtgccatttgcctcatacaaatactatctaatgcttctcatctcgctcaaggcagaagtaaaatccccacatcaatgtacaaagccctgcatcttctgcacctgtgcccctttcccaatctctctgacctcacctcctcctgctcctcctgcctcactctgcttcaaccacactggcctcccggttattcccatgacacacgcctgcctcaggacctttgcatgtgctgtttcctctggagtttggcctggctgtttccttcacctctttatccaatggcacctcaatgaggctgtctcagagtaccctatttcagttgcagaactccccacacatcctatttcccttgcccgcttccctctccctcaataacaggactgacttttcacctttcaacagaatgcagtttactcctttattttgtttttagcctgtttccttcccctgctgggaaataagctctgcaaggacagagtttttgtcagttttattcactgctatattcccggtgccccaacaggacctaatacacaataggtgcttcataaatgcttgttaaaggtttttgtttgtttgtttgtttgtttttgaggcagagtctcactctgtcacccaggctggagtgcagtggcaccatctcggcttactgcaacctccacctcccaggttcaagcgattctcctgcctcagcctcctaagtagctgggactacaggcacacgccaccacgcctggctaattttttttatttttaacagaggcggggtttcaccatattggccaggctggcctcgaactcctgacctcatgatccacctgccttggcctcccaaagtgctgggattaccggcgtgagccaccgtgcctggccgtaaaggttgttaaacagacctggaggacaaaggtttttagtcacttcacctttagaaaacactcttattttctctgttcattttggcaacaccaacaactgaaaccctgcttttctaaatatattgcagtttgattaatctcaaaataagtcagctggttttgcagagacactggcagaaccattttggggtgagaggtggcaacctgggtttaaaaactattataggccaggcgcagcggctcacgcctgtaatgccggcactttgggaggctgaagcgggtggatcacctgaggtcaggagttcgagaccagcctggccaacatggtgagactgagacttaaaaatacaaaaattatccaagcatggtggcacgcacttgtagtcccagctactcaggaggctgaggcacgaggattgcttgaatacaggaggcagaggttgcagtgagccaacatcacaccactgcactccagcctgggcaacagagcgagactctgtcttaaaaataataataattattattaaataaataaatataaaaactaattacagctgcttgagccacgaaaaagaatgaaatcatgtcatttgtagcaacgtggttgtaactggaggtcattatgctaagtgaaataagcgaggcacagaaagacaaatactgaatgttctcagtcatacataggagctaaaaaagttgatttcttggacctagagaatagaataatagataccagagaccaggaagggtgggtggggggcaagagaatgaagagagattggttatgcgtacaaacatacagttagatagaagaaataagttctggtgtttgatagcagcttagggtgactatactataatagcaacaataccgtgtacatttcaaagttaccagaagagaggacttgtaatgataccaacacgtaaaaatgataaacattcaagtctatggacaccccaaataccctgtcttggtcagtacacattctatgcatgaaacaaacactcacatgtattccacaaatatgtaaattattatataccaataacagagaagaaactaattataattgacccataaagtcaagggtgagttgagtctatggatcctggttacaataaacgtcttcaagcctctgtcccctttgctaatgttttcataaccgagtaactcacttcagcctcacagcagacccatttcccagacaagaaaactgagacacagagaaaagtggcttgaggctgtaacttgatttgtgaaagaaggctaattttacccattttttccatcggccattccttattcctgcaaaacacttgcgtttgagtctgaagacagttcacacattgcacgggacacctgcagtcacctgcctccttccaaagttggctatgatcaggtctccaagactcaccctgaacctctgccctagagtggtgccacaagaggaaaaagactctaccaacttaacctgaattgcttgccgctggtggaactaaagtgggaggcccaagcttcctctacagagcctctctctccttagaaaaaaaaaaaaaatcaaccaggaaaggcaaattgtacagatgccactaaaaagaaattcccgcttagtattgcttcctctgcacccagcgacttttagacaagcagaagacgaaatgccctgcccgcgactaaaccagactccttttcacttactaccctttcagcgtgtgtgtggcctgatgtccaactctgggctctgaatccatcactaaactaagaaccgtacccaacaaaggacactgacacatggcacaggctggccgtgctgccaggcagagataggacgggttctatctacacagggagaacaagaaggctggagtggccttgctaacgcgccattatcacttgaaaaatatccatgagagcctatctccccaggccacgccgccgctctttcccttccttcgtagacatatttctctccatgaattaacaacataaattaaaagaaccgagcaggtgtgaccatgagaccaccggcctccgtgagtctttgagaaaacaagccaaagtccccttccaaatgacagtgacagccccctagccgggtggcccaccccgcagcctgtaataacacacctacaaaacgcagtttagcagactcaaaggaaagcctctaagatctcaatagatttggactataatccaaaaaccatccctccccagcgctattgctgacaggacataattcagagacccaggtagttggaactcaatttgacagcaaatctctggatgtaaaaaatatgaaactggcttcagcgagtagggcagagtccacctgctgccttcagctacaaggtcgatgtgccgctatgctaaggcagggagcccacggggaggcgaggcgggtggggtgtgcaaagctgctcttgctcgcgtgctgcctactggcgcggcctgggtggccccctcctgacatctccccgtccacccgagcagccgcccagtactcacttcgcggaagcccacagaatagggcatgccggtctttcagcaggggcccgccgaagggccttgggggcttgaggaggagcagctggggctggcggactcaccgcagcctctgcggggcctgtgacgtgcgggccaggcccccgagggccttatcggccccagaggcgcttgctgtcgggccgggcgctcccggcacgggcgggcggaggggtggcgcccgcctggggaccgcagattacaagagcacctcctcccccaaccccaggaggccccgctccccaggcctcggccggcgcggacccctggttgccccggggtcgagagcagccggggagagctgagttcagagcccagagttggacatcaggccacacgctgagagggtagtaaatgaaagggagtccggtttagtcgcgggcagggcatctcctcttctgcttgtctaaaagtcgctgggtgcaggggaagcaatactaagcgggaatttctttttagtggcatctacacaatttgcctttcctggtttttgttttgttttgttttgtttcctaaggagggggaggctctgtagaggaagcttcggccctgggtgcccctgggttgggagcagtcggggagcgctgagccagggcgcacgccctgtcggcgctgcgggtgtggggcgcaggagtccttctggccggcccctccgccccccggggaggctggagctctccaaggccggggagcctcccgaagcgcgctgccccctctgttctccgcgtgctttcactagggccccatgctgcttagtggccgatttgcagggaatctgggcacaatcttaataacaccagggccaaaaataacaacgttcctgggaaccgaggtgagtcaccgcaaacagcggctaggagggcgtgggatggcgcgggcaggggggcgcccaggcggtcccgcagctgccagaaggtcggggctgcccaccagccaggctggaccatcccaggccaagctcctgcaggcctggcctaggaagccgccttttgcaacgtccgcccgtccaacaacgggatgagatgtcatctgcccagaatggctttatcagtgagaacaccatatcctggaatggcagttggtggctggcagagggaacaggtgaccccgaggagctgagctgcggggccaggggcatggcagcctccctggaccctgggggtggtgccattaaggtgggggctgtctccctccatggtttcctctaggggtgggtgtcaccgctgggggcctctggtgcagtcctccctgagaagggtctctccagccttcctcacgtgatgcttggcctcctgctgggcccacgctggtccaggtcccctgacgaggccgccatctggctttagagctttcccgcagcaccaaactggccttgccatgagggcacagctgctgcggaaagatgccaccgagatcagcttcatgacccgtctgtgttttccacagcagctggagcgcaccccatggacgctgggccatctccccggggactagtgcctgacagagctgacagagttctaggccacatgtgggctagaaggaaccgccatgtctaccacagcacagtccttaagcaggagccttttgaagcacttggactcaaaacaatggctgtttgttgttgttgttgttgttgtttgtttgttttgagggagccagaaagctaaaaaatgtaaaagaagcaggtcacattagacatgatttcagacagcctccccgaaggacagatgatctcacttggcaacacatactgggccaggctcactcatgagggggcagcgtggcatgcaccccactcaggggcaagaatgaagcttaaatattagctgactcagaacatagcaagtgctcagtaatggcttctggaacgaacccgtggttgtcaccagcaggagtgacgaaagctagaagccgtttcaccatccaaggaagaggaggaacaatatttttctctttggagttcccacactcagaagagagaacaccagcatatgaacacagagtgtcacatgatgtaggaaacatcctgtaggtagagagtataattccaaagcttaggatcctgctagttccttgtgcagtgcttccggtgggcaacatggtgcctccccagtccctcaggcttgaggcgggccagcacagcttctctgggagccaggtcatttcagaatttaaccccagaactaggtcaccccaggcaacacaaggctcctctcccttggatacaggaagcggaggaaaaggccaggcatgctcaggggcaaaccaacacccaggtgaaagggagctgggctggtttcggggagcagcctggtttcagggagccggactcacgatgtgcttgagaccctcaaattcacccctggaagcagctgcccccgtgacaaggaactaaggacaggcatgtcatggactgtgaattggagtgacatttgtccctcccttcaccaacagactgccccaagagcttcccaagttatctgccatagaataccttgtttccctcgagtctctgaaagggggccgcaaaagctgtccccacgctggaaatgcagggccaggcttttaaagttttgctcccggattatgagaacacctagaaaattcagtgctcctctccactcccccaaaccccttcacaagcccccaccctttgtttaacaaacatatatatagtgctttcctggtaccagatactactttaagcacttgacaaaatatttagtcatacataaaacccttataattacactgtaattcactctcgtcagatccagtcattgtgaagaaacggaggcacggggagattaagagagctacttaagaagacacggtgccaggtttctacccaagccatttggatctagggtctggaggccatgtgagccattttgcattagattaacgctttaattcagttcacagttagacaatatacgttccccatctatatctatacccatctggaaggcaacaaaaagataataaactgatagtgtcatgtgcccatgacccagctaacaaagaggctctgggttccaatgccccagtctttcatgggattccatcgacctcatgccctgctcccctccccaacagagatggaaacattatcctgaattttgtgtttatcatcccttgtttctctctatagtttttccacttatggttgtatgatttttgtttgtttgttttttgagacggcatctcgctctgtcaccaggctggagtgcagtggcgtgatctcggctctacctcccaggttcaagccatcctcctgcctcatcctcccgagtagctgggactacaggcacacgccaccatgcccagctaatttttgtatttttagtagagacggggtttcaccttatggttgtatctttaaacaatgtcttgtttagttttgccatgtttttggactgtgaataagtagaattattatgctgtgtgaattcttctgctacttgcatttttgctgcaacgtcatgttcctgaaattcagccaggattcatttattccttttcactgctgtgtgatatcccattgtaggcaaatagtacacaatatttatttattttccagatgggatctcattctgtcacccaggcttgtagtgcagtgaccccatcacgattcactgcagccttgaactcctgggctcaagcaatcctcctgcctcagcctcctgagttgctaaggccacaaatatttatccattttactgctaatgcaatttgagctgttttcaactttttcctattaaaacattattgctatgaacattcttataaaagcttcccagtgcacgtgtgtgagatctttctagtgtgtatgctagcaggagaattactgagttttaccgtacatgtatcttcaatcttattagataacactgacttgtttttgaaattggctcttccaatttacactgtcaacagcagggttatgtggttgccctgcaagttcaacaacatttggtattgtcagactttaatatttttgtcaatctggttggtataaaatggtatggtgtggtgctttttatttgcatttccatgattactaatgaggttgagcatcttttcacatgtttatgggccatttacttttcctcttctatgaaattactattcaagccctttgcccatttttctgttatgttgtttgtctttttcttatcgaggtggaggagttctctgcagtctgaatacgaatcatttttcagttatgtgcattgaaaatatctcctcccagtgtgtagttctttacactttttaaaatggtatcttttaacgaactaatatgggttttaatgtgtcaaatatgttgatcattttctttatggtttgtgtttcttttgtcttaaggagtccacttctaccctgagcttatacaattttttctgtattatatttattttatagggtttttgttttgttttgttttgttttttgtttttgagatggagtcttgctctgtcgcccaggctagagtgcaatggcaccatctcagctcactgcaacctccgcctcccgggttccagcaattctcctgcctcggcctcccgaatagctgggactacaggcactcaccaccacgcctggctaatgtttgtatttttagtagagacagggtgtcaccacgttggtcaggctggtctcaaactcctgatttcaagtgatctgcccaccttggcctcccaaagtgctgagattacaggcatgagccaccacgcccgacctatagttttacttctcatatttaggtctttaaatccacttgacttattttgtgtatgatgtgagttgagttctgatttttactatgtggataatgaaatatccctgcaccattgattagcccatcctctcccagctgaactgtgtcatgttcatcgtttattaagtctccacatgcatgagtctgttggagaggagaactctctcctatgatccattggcctataagtctatctcagtactgatgtcatactgtcttcattgctactgcaactaataatacattttataataaattttaatattgtccgcaataagtcttagtattgttgaggaagtctctttgctttattcctctagaaaagcatcataacagctgggcacagtggcctacacctgtcatcccagcactctgggaggccgatcactcgggcaacatggcaaaaccccatctctactaaaaatagaaaaaagtagccaggtgtggtggcttgcatctgtagtcccagctactggggaggctgaggtgggaggatcacctgagcctgggaagtcattgaggccgcagtgagcgatgatcatgccacggcactccagcctgggtaatgagaatgagaccctatctaaaagaaagaaagaaagagagaaagggagagagaaagggggggggggagagagagagagatgaaaaaagaaagagagaaagagagaaagaaagaaagaaagaaagaaagaaagaaagaaagaaagaaagagaaagaaagaaagagagaaaggaaggaaggaaggaaggaagggaaggaaaggaaaggaaaggaaaggaaaggaaaggaaaggaaaggaaaggaaagaaaggaaagaaagaaaagaaaagagaaaaagagagggagggagagagagagagagaaaaaaaaagcatcaaagcttctcttggtcctttgccctcttgtttgatatttttattgggttgttacagtctatagatacatacatttttgtatcttgagcctgtagccagaaatcttgttgagctctattatgaggtctcctagtttgtccctggctggtctgagtgcagtgatgtttacaactaattggtcacattcagttacagatttatttgttccttctccattcccactgcttcacttgactagccttcaaaaaaattgaccatgattctctttgatttttctctgtagacaattattattcacaaatcaggacattttgttctcttcttttacagtttttgcaccccttctttgcttttcttgctctattacattgggtaagatatccaatatatttttgaacggaaacagtgatagcatgtttatctagttgctgacttaaatggagctgcttttaaagttttaccattaagtataatgtttatgtaagacttttgtgaatatctttttattagttaaggaagttagcttctagtctcagtttattaaaattttaatcatgaatgaatgttgaaatccaaatttttcttttccttttttgtgaaggtggtacattgcattaatagatttttctaatgctaaactatccttccatttttgggttaaacccttcttggtcgtaatgaattacttgtaatatagcaccattgaattagagttgtggaattttctacaggatttttgcacctatatattcataagttatattggttattttaatttgctactgctgcataacaaagtagcccccaattgtgctgattaaaatacgtaaatttagtatttcagagtttctgtgggttgggaattcaggggcagctcatctgggtggtactggcacagtgtctctcaggaagttgccatcaagatgtcagctggggatgcagtcatctgaaggcccaactagggctgggattcacttccaagatcctcagatggctgctggcagaagctctcagctcctcacctcatggacctcccatagggctgccaaccatcctcttacactgcagctagcttttcccagggtgacccaagagagaaggcagaagccacgaggctgtcatggcctagtctagacatcacatatcatcacttctgccacattctatttgctagaagcaaatcactaaaccagcccaccctcaacagcagggaaattgtcaaagggaagtatatcgaagaatgtgtacatatttaaaacccccacatggcctatcattttcttttcctaaattgtctccagttttagtatcatatcatactaaactcataaggtgagttggctggcttctctccctggctatgagagggattaattaattgcccgcaaaataatctggtctttttcaatgagagggtaactatgggagggagattactgatttactttatttcatgttaaatgtttgctcaggctaccagtttaggagatcaatatttttagaacatattccagattctgaaaacttgattctcattcgcttaaactttacacatctccatctgcttggcactggcttagagtgctgcgaaattcccacattccggcaaaacacggtgaaaacagagaagtgacctcagtcattttaaaaagtcagcatgaagagtggggaaactaaaagctttaaaaggttaaacaacagatgcttaattaattttttaaaaattcaagggtaaactcccactcattccggtaaacttagagaatagtgttgaatggaactcaaacttttttatctcgggacccttttacagtaaaaaatattaaggatcccatagagctgtttctttctttctctctgtgtgtgtgtgtgtgtgtcgtgtgtgtgtgtgtgtttctctctctcatagagctctttctctctttctttctctctctctcatagagctctttctctctctctctttctttctttctttctctctctctgtccctctttttgtctctctctctctctctgtctctctctctttgtctctttctctctctctctctctctctgattcttgctctgtcacccaggtaggggcacattgttacaatcatggcttgctacagtctagaacttctgagctcaagcaatcctcccacctcagcctcgaagtagctgggactacaggtttgtgccactgtacccagctaatttttttaatttagtttttgtagagacaggatctcactatgttgcccaggctggtcttgaactcgtgggctcaagcgatcctcctgattcagcttccccgagtactaagattacaagcatgagccactccactcagtcccatagagctttttcttaaatgtgacttatatctagcaatatttactatatcagaaattaaaactgagagtttctaaaactatgtatatattaattcatttgaacatagcataataaaccaatttcacattaatacagacaacatatttttctgaaaaataactatattttccaaaaacaaatcagtgcaaagagggtcactactttccatttttgcaaatctgtttaacatctggcttaagaaaaaaacagatacgttcccatattgccatctacatcaatgtggtggaataggttgtgtcagttgaggtatgtgaagatctggcttcgcttggatatgtagttggaaaaaggaggagtattttaatagccttttcatttaattgtgaaattctttttgtatactacataaaaactcaacaagtaatttcttaaaggctggttacagagtggaatcacaaagaatattaatgagcttttcatatcctttacacttgcaagagagggaaagtgaaaaagtccaataacattgctgtattatgaagaattttgaccctagaaccccttgaaagggtctttggggagctccctgggtccccaggctacactttgaaactggaagtttaggcactcaaatataccttgacgttaagctatttttaaaaatcacagaaccagagtatgatagactggacaagaactcagtgagtggtggggcccatgtcctcattttgagaataaaatggcagcccagggagacaacacaatttgtccaggatctttccagagcagagttcatgcatgccctgttctttccactactgtgtataaaaaggagcaagataaagggaaaaaaggaggaaaaagataatataaaagcagcacaggccaggtgcagttgttcatgtcggtaatcccagcactttcagaggccaaggagggaagatcacttgaggtcaggagttcaagaccagcctgggcaacatggcgaaaccctgtctctactaaaaatacaaaaattagctgggtgtgatggcacctgtaatcccagctattcgggaaacaggagaattgctcgagcctgggagttagaggctgcagtgaaccatgatggtttgagcctggaagttcaaggctacagtgagctatgatggtgccactgcactccagccttggcaacagagctagactctgtctcaaaagaaaaaagcaacacaatgttgtaagagcagattgtgacaggctccactctcgatggttttccatgacgattgtccagtttatagatgtcttgtcctcagaaatccctggttatgcctgcattggatcatgctgttgctgctaacagttttaccatccacagatgtgagaaaaataggggaaaaagtaaatccataaaattatacttcttatccttataagaggagggatggaagaattagatactttacaataatgctaataattaacatttattaaaatttattaagcacttactatgttctcattcattcatttgttcatcattcatttattcactcatccatctttctcgtaatatttaccaagcacctattatgtgccagtcatactactaggtatgcaatgggtaaagaaaacagacacggtctagagttttgcattgttattcactcatgactccagcaatctgatggggcaggcactgtggtaacccccatgttactcatcagatgaccgaggcaagagaggtgcttaccaaggtcacagaaccagtgagaaatggagacttcaatccaagtctcatgcttaaccatgacactatattgcctcccagataagactctaacgtggctttgagtcacttatagtttatttatgttaatttatactcccttcaagtccagcattggaaacagagagtccgtactgccctgtctgtcgtggccctttcaccttcttcctgtgaatagctggcccaacatcacaccttgtatctgtaagcaggactatccctaggagttgacaggaaatggcattgaagagggggtggtgtactagatggatcacacggtgctggtggtggcagtggtcatgatgaagaggacactgatgaggccgggcggtatcacataaaatctctgatcccctctaagtgctcttgagataatatttgaaatcttagggcattgacttcctctctcgtttttaaatctgagagtaaaatactagtgttcaaaggacgctagttgaagaaagccagatcatgtctccaaaacttccctctctccaagcatctacaagggggagccaaagaagggagtgggaaggagaactgggtttctctctacaaagaggaggaggagaggagaaagagaggaagggggacaaaagaagggggaaggaggagggaggggaagaggaggaggggaagaggaggaggggaggaggaggaggaagaagagaggatgatgaaagaggaagaggaagagaaggactccttctggagactgtgcctggccagccccaaggtcggcagccctctgctctaaggccagacccagaaagggtcttctctgcagagcatgccagagccagggacaccccacctcctctatgagtgcagcaccctggggctacctgctgcaccaactcagacagctctggcccaccattgcagacccaccatgcaatttctgatcacacccaagctcccatggggttgtttcaattccagagcaacttttcctgacagctccttgtctagagaaaagcactggagtaagatggtctcagtcctgggtgagcctttgttacttaggccatggaacctgggacatgccacttacctgttgtaagtaaggcacagtgcctcaagcctgtaatcccagcactttgggaggtcgaagcgggtggatcacttgaggtcaggaattcgagaccagcctgaccaacatagtgaaactccatctctattaaaaatataaaaattagccaggtgtggtggcggccacctgtaatcccagctacttgggagtctgaggcaggagaatcaagtgaacccaggaggcggaggttgcagtgagtcaatatcgtgcccactgcactccagcttgggtgacagagcgagactctgtctaaaaaaataataataataataaataaaaatgaaaataagaatgtttgctgtttcatttaacccaccccctactgctgcacacagatgcttcctaaattttttttgctaatttaaacgttacagttaagattttgtgctcttgaatgtgactatttccttaagatctttcccagataattttctagactgcctgaagtcacagcttatgaacatttctgaggccttattgggcattatagattttccaaccagaaaatgagtgtttctctgcaccgtgctggcaaagggtatttgttgttattatgttttaactttttgctataggattatcatccccactagtcacccagctgcatgactgccctgcaagtcttgttcttgcctttggatggccagacccaggtgaccacacaaatgtggttcatccagggctcacacttccccaggtgactctccttaactggggagtcgttcttaatctccactttgatctcatgccttacgggtcttttttgtacatgttactgagttaagggcatgaccaccttacacatgctggcttagccaagatttatttagctaattatcccaatcctttgaggatctgtaaaacaaacactacatctacaccaaatgcgcagctctgtgaaaacttccaagccagcaggaggtttccatcttataatcatcatagaaataacgtggagcaattagcaaacgcgtcaacatgcactatggtgtgtgatactcaaaaccatgctggagtttcaattatcatgaaaaattgttattattcctgttttacaaagggagaaattggggctgggcatggtggctcacgcctgtcaccccagctactttgagagccaaggtaggaggatcacttgagcccagaagttcaagaccagcctgggcaacatagcaagaccccacctgtacaaaaaattttttaaattagccaggcatgagggtgcatgcctgtagccccagctattcgggaggctgaggcaggagggtcgcttgagcccaggaggtcaggctgtagtgagctatgatcgtaccaccacacttcaacccgagtgacagagtgagaccccacctctaaaacaaaataaaaatagggaagaattgaaactcagaaaatcaaactgcactgcccatgatcctacagctaattactgactgaggctggaatccattcttctgactaaaccccagatgctctgcctctcctactttgtgaaagtaatcagtcctgttgtttcaggttaactgacggctggtggtctcccaccgtcatgttaccgtgagccacggggatccacagatgtgggaagggcgtgttatatgcaggcagtggggaggggggacagggagagagactgaaggagaatttcgcttcaggttcccctaaattccatctttacccctgacctgctgattataaagtttaaaacattaaaacatcctgctgaagggtcattctccaacctgaagggcatttagacacccaaactctttccatttctgctttcagatctgggcgaggtctgcctgattattcatagtttggcatttcctaaatccaggtggcgctgggggaggaaagtccgtcagactgacaaatgctgaatgtgcacaacttagctgaagaatcagcgaatctgcggtttcatgtcaggaggtataaagattggaggctattttatatttccccccaaaagagggaaatcttgggcaatggccactccagctttttcctgcacccctcaggccgtggatctgacctccacagaaggaacgtgtttccacggtgaagccatctgtggcccctctgctgaggctgccctacagccgtgcaaaggctttttagtggctggcaaacccactgtctgtaagcagtggctgcaggtccatcgggccacacaggagcagagcatctctgagtcatccagagtggagcctctcttctggcgtccctgacgggccttccagagcaacgtgccgccgaagcgtaatagcccgatgggttcatcttgcccgctgcccagaaagccaaaagcgcggagaacaggcactgccccaaagtaagggcctcatgaccacagggccgggagagccaggagaacaggagaaacttcccacacctgtctccccgggaattcggaggccagggtgttttaagggtactttggcaggcagaggctgggaaactgaaacaatggatggcatcacagaggtgcctaaaatcgtcttcacgcaggtgcgtcagttcgcgggtgcgggtctcaggaccaggtggcggttcttggtctgcagaaatgctaaatctgaaaaaatatctcaaaggccccttctttaggtttcacagtagtgatgttatctctagggatagtcagagaagttataaatcttgcctgccctggttacatgactctggggcagtacacaatttatagaaaaacaagctaagcatggcagctcattgtttaactctgcctatcctttagcaaagctcaagccgctaccataattcaaaccttgtttcatgaatgcagcttcaatctctgaggaagggagcgggggtttcagtttttcttgcttcaaagtttaattataaactaaattcctctcatagttatcttggcctccattccagaataagcaaaaaacaaaacaagaaacaagttagcctatgagattagaagcaagatggagtcagtcacgttagctttctctcattacttagaattctgcaaaggcggtttcagaagactcggaagtccctcctcacacaggagctgccattgccccgcgactcccaccttccgcttccacttctgcccatcagccccattcggaataaacccaccgccttccccctcagtcttcatccactcttagggatggcactgccctccctggctcagactgccctctccaggccacaggccagacccttccaccagtctttgtgctgcagagaccagagcacggaacctcccaaacctcagtgtgttcaactgcacagtgggactgccaatagtgtccacctgacagggatgctgtgaggactccgtgaggttatgccggtgcaatgttcaacacagtgcccacacgtggtatgtgctcagtacatgtagctattgttattattattattgttaatttctctgactatacttttagtttgtccatgtttctcaagatctttcagaggtggtgatgacatacctgtatatgtcctaacacaagacaaagagcaattatagcctccattcatctgaatatttaatgatccagctccctgagagttaaatgaagctgcttgctatgtctgcaggcaactgtaaactggaatgttaatcagtacatggccagggatggggcccagcagcacatcactaaagctctcccttggggctgatattaattcatcaagtaacccacttaatgtatagttgttccatgagttccaaatcacttcgttatcatcatccaacccaaatatcttcattttccttcactttgtctgcaggggagcaaaaatggcttctctccactgttctaagttctttggctgtgctacaaattaagttgacataatacagatgaacagggagaaaaccataattatatacataattatatatatgggagtcccacaaaatatgagactcaaagaagggtcagatgtttgaagctgatagagtgtcctaagctgtagaaaggaagaagggcctggggcctccaggaggaggcagtggccagccatggaaggtcaacggaggaaatgcatggtcagcaaaggctgtcctgctatgcagataaaaagtaaaagttgtctagagcagtcctcttcctgataaagatactttcattactgtaggtttctttcatagatgtagatttccttgacaaaaagacagcttcttagagctactcttgtgtctgcagtttcttagaataaccagcatgaaatataccagagaatagcggtccccaagctttttggcaccagggaccagttttgtggaagacagtatttccacggaccggaggtggtgggatggtttcaggatgaaactgttccacctcagatcatcagacattagttaaattataaggagtgcgcaacctagatccctctcatgcacagctcacaatggggttaacactcctatgagaatctgatgcattcgctgacctgacaggaggcggagctcaggcagcaatgcttcctggctcattgctcacttcctgctgtgcggcctggttcctaacaggccccggacaggctgaaactctcccaagaagtttttaagtccagaaactgagttggtagtttgtccaataacccaccaaagcgtcatttctatggcaacaaaagaaaaatataagttaataactggagcagagaataaaccaaatttctaagtctgaagggcagccagttgagaaaatgtctagattgtgggttataacgaagcacattttgcagtttgaatgtctctggcgatctaagtggcccacagggcaataggcacaaaggttatccatacacagcatgttgtggcgatttctccaaagttcacatcaggtcatctggcttcagcttgcggggcttctggaaaaggacagcttttgtttttagtgattccaagtcagaaaggtgggagaaattctgaaatgttagcttgtagagtcatagccagatattaagaaaattcaggttccagtacagtttagaggtagataaacatctcaagaaacatgaaggccagaatataataacaggtaccctatagtttctactgaaacatggattttcttacagtcacccccaattttaccaaaggtaattacagtaagactaatatatctgcaaaataactttagtcttctgaaacttggcctgagcatttacaaaagtgcagcaagaatggtgattgatcatataagctctttgaagtctgttttgctagaacttttaatagggaatctcagattggacttttaaaatcctattaaggttaggaagccaagcaaaggactcatcatcaaacttcgtctgtaatacctgtagattggggtgaattcctctcttttcaagatccctaaaatattctgaggttcctgggcctgccaagaagtgacattccttacccacctttaatgtaacaatatgaactatgtattcaaggtaccacatcagttgtttgtttttccaagggcttcattggctccataaagtcaaccttagttccttaaagttgtctggcatattataaaatgtgacattccagtcaaagcattggtaacataatcagtgttttcaattgtgtcctgttacaagaacagattcttattacacttatgcaaataactatactgccattttaaaaaattcatagaggccgggcgtggcggctcatgcctgtaatcccagcactttgggaggccgaggcaggtggatcacgaggtcaggagttcaagaccagcctggccaacatggtgaaaccctgtctctactaaaaatacaaaaattagccgggcgtggtggcaggcacctgtagtcccagctactcaggaggctgaggcaggagaatggcgtgaacccaggaggcggagcttgcagtgagctgagattgtgccactgcactccagcttgggcaacagagcaagactccatctcaaaaaaaaaaaaaaaaagtatcctcctgggctcattcatttgcatgtaattagttcttattctgcttcatgttattagcagtttcatgaatccatcagtttccttattagaattctggagattactatgcagtctggtggtatgatcataaagttatcagaaacctgtattccaaaatatttgtcagagtgttttccatgaatctccttaaagaagcttttagagaattaaagtaaaacaataaatggatgacaaagacttaaaatagccatggttaaagatcggatgagatttcattataataatgatgcacctgacaagctatttatttatttttatttttttattttttatttttagattcttatttttttttattattcattttatttccatggcaaacaacatcttaaaataataactagaatcatgactgatttatcggaacttagcagatttctaggaattgcatgtaataacgtatatccacataactcaaagaaggttaaacatcatttcctacttgataatgctttccatgccaatgtaacataaaataaggccaattagcttagtaggtatgttttataagaagacagaacaatttgcttttgaaaacttccaggggcccatctgagaaatcccgaagttatttcgagatcaaaaagatttaactttgaatttgattttggaaagtaccaatatcaaaaggtttaaacatttgattaaataggatcacagatcattatgaagtaaaatcaaagtgacatgagatcttaaaggcaaatattaaaggcttacataatcataaaaagccttaactcttttaatattgagagactcagttttcttaagtaatcaaagacctaataatgaaaacatgaagcacaggaaattattttgataaaacacagaatcctcttttttttaaggcagatcactcaaaaggtggaaaaaaaatttcactatctcttattaagactacaaaacacccttgttgttagaagagaagactaaattctagttttgcatcagtgtacttttgatattaagactcattttaaaaaccgttataataaatgtattccattttagtcagtttgaccctataggatccctcttgctctctttcttcccaacttcatgtccattcagttttcccccatctttccttctttcattttgaaacaaccttttgataacctctaaactagacaaagttattttccctctacaaaaaaaacctcataccttataacaacttactttccttgtatactttctatgcagaattgtttttcttatcatttacagtagttttaattatgttattagaattttaagacttagtaaccctaatttccagtgaaaacctaggaagcaagcaattttgaactgtcacataacatttgatgactgcatatttcatcatttctagaaatatatgcttcctcatagaatactttttcaatgtggaacaggaaatatttactaacccaagtatattttgtctctataaaatttaagaacccaaaggtaaataaatttatgttcaccagttaatgtttcagtactttatcttatttggaaataaactagacattcgatgaagatatcgaagggtatacttaccaaagagattgggaaacctttttaaacagacatattataaaacattattactgtttaaaagtccatttataaacctttatcgctcttacatctgtgtaattcacttgttcttaacaattatgtttggattattcataaaaattaaataagacattagataaagctagccatcatttcacgctatttccattaactattttcatagcacctgcatgttatgagagtcacaaaagcaagaacataaaaagttaaataattggacttttgtcttactgatgtgattgatatacacacagtaatggacactgcagttttacttgcacagttgctcttaggttgaacccatagtcttacgattttaaacatctaagagatgaaaatttggttgcattatatttaatgctaacaattctgaagacttgcctgttttaattaaacaaataatattcttttttttcttatttagagataaggtcttgctctgtcacccaggctggagtgcagtggtgcaatcatagctcactacaacctcgaacttctgggctcaagggatcctcccacctcagcctcccaagtagctgggatgcaccaccccacccagctaattttttattttttgtagacacagggttcttgctatgttgcccaggctggtcttgcccttctgacctcaagcagtcctcccacctaagcgtcccaaagtgttgggattacaggcatgagccaccaggtctggccaataatattcttatttaccaaattttatcggttacatgaagttgaaaagcactttggttaatttctctttttctgagagaacaatttttataaacacttatttttctttaagccaattaaatagaccttatccagagatagaaaatatcacattacatgacatacatacatacttagacatacataaccatatagatagaaacagatcttactaaattttaaccatgtgccagatacaataattcaaaactcacttataagagaatagctggatctggcaaatgggaccagtgaagtttccctgctcaggtggctcatgcttttgtactcaagacttgtcatttgccagtttccaaatagtttcttttttttttttctttttaacctgagaatcatctccctgaagtttgcacttcaagaaggatcttgataagatcttagataagacaggttagaaaatttacatctcaaaagcacagagaaagaattcaagttttcaacaggaaggagttttggggggcacatttgcctattatcagaagtctaggataaatctattaaaacttttccttctttttcttaaatgcaagacacttttgtttccagtgttctgatttgctgaagtttttgcaaacatcttgagatgaacaggtgaggtttgggtactggtaagaaggctaggtgggctttgaattgcttccagaggcacattcctgctgtgataaagcctcaatgtgtaagacgaggacagttgtttttaattcccctaagaactgggttgcagcctgaatgtcaaggtgctgacccatccatccgatcttcagtttgctcctttatatcaagaagcagatttccaactaggatggaaaccaaaatattcctctgttctagagttagagctatttgtctagaaaagttttaataaactgttttctttctttctgagtacacagttccattttagcttaggagggaagagctaaaggaaaaaattcctatcatgctttatataaaccaaagctctaaaccgaagatatacctaacaagtgactcaagaccaaaacaaacatgcttttcaccactgaaccatgaatgcatgaggcatctccaaagagagacaaaaaagatgcagccctttcacaatccagggccactcccaaagacagccacggagagaaaccctgagacgatgctcctgagaagtggcaagagttggtgtgccagctgccaatgggctgcacccatgtttctgtccggccacattcttggagatttccaaccttttggatggccacctgcacatacaggcccaataacccacgtgcccccgctggctgcaaagtcaaacaaagttcttggggaagaaaaaataaaagaagacgtataggaaagcaataactatccacgggagggaaagggttaataactaatgggtaccccaacaccaagactcaattcaaacccattcctacaaatgtttcccgcctgagctaatggaatttactgagaaaatggagatttggaggagtaaagttttaaatcaggggcccagagctccagagttcttccagagggtcaggaccagggagttgtggatataagagagcacagaagaggaatttaggccaaatttaaacaattttaacttggttctaaacttgatttctgcttttaatcttgctaaaggggccctaaagctaatcattaaatccattatgtcttcttttcagttggattataccataggtatcagtaatacagttgtttaggatgtgagctctctaaaaattttttcaaatatagccaatttatttatcccagaggtagtgactcaaaccaataagtctttctttctttctttctttctttccttctctttccctttctttctctctctctttttctttcttctttctttctttctttccttctttcttctttttcctttctcactatattgcccaggctggtcttgaactcgtgggtttcagcaatcctcctgcctctgcctccctaaatgctagtgagagaggagaatggaaaaaacctggtcaggcaggcaattaaagtgtgtccttggttgaattctttcaaacaaaagaacagtccacaggcacagataagggattgtgcacagcggggcttgcctaagacacgcccacagctgcacagataagaaagcctacacaggtaacttgcccagacatgccggcaatggaaaattctgttccctaacatatgcacagtaaaggtaacaaagcaatatggagtaactcaagctaagggcccgcatgcacactagaaggacagggtagatctaccagcctcattgatgcccagacctcactggtttctcataaataagcctttgcattcaactgtaaaaacagcaaccctcttctgggtcccctctccacagcagagagctttcttctttcatttgttaaacttttgctccaacctcaccctcggtgtccacgcttcttaaatttcttggtcgggagacaaaggacttcaggtactacctcaggcaatgagagactgctacactgtggtgcactgtcgagactgtaacactaggattacaggctgagccaccccactcagctccaataagtcttttcaaagaaagacccagaggtaacttgcaggtttagaaagtaggcagagaagatgcagctcccaatgattgaagagttcattcccacagacagacgaagaaagctaagaccttcattgccacaggtggaagggatagtgtttgtgaaaatggtgcctccagcctcccttggacacatggggaacctccaggcaccagcctgtcaatctatgatgccaggcaggacctactgggattggactttcccagcgctaaccaagcaatcaaaggttgggatgacaaaagcccttaagaactgggacctctgaagacaaactcccctgaaagcaggcacagtcacagagagaacgctgcttatggcttgcgacttgggctcccagcctacttcactggcctcctgacacaagctgacacatgcaccccagcctggcagaggccagagagtattctcactgatcaaaaatacaggatctcacaacataaaacaagctggaaggagaatctcatccattttcttctgtctcagggacacacagcaaagttcgtctaaacagacaccaatatggtgagaatcatgaactcagcagcctgtgaggccagctcaaaccactggcttatgtagggcccatgccactgatcccgccctgggagtctcctccttatgacacatgacacaaaagacacaggcaggaaaacaatgaccatctctgggagggagagagtcagaaaataaaaatactcatactcccccaaaacatcagagttgctccacaggaactaattcacacacgttttctaatttaaatttagatctcacctttttttttttagatggggtctcactctgtcacccaggctggaatgcaatggtacaatcattgcttactgcagcctcaaactcctggactcaagtgatcctcctgcctcagcctcctgagtagctgagattgcaggtgtccaccaccacaccaagctaaatgtgtgtgtgtgtgtgtgtgtgtgtgtgtgtgtgtgtgtgtgtgtgtgtgtgtagacatggtctccctatgctgcttaggctggtcgcaaacacctagtctcaagcaatcctcccacctgggtctcccaaagcactgggattacaggaataagcccccacacccagccaccactctcattttgaccacactcggcaggcacagatccaggagcctaatttggtacaaaatgttacctgtggccagtgttttctcaggggtcccaggatcctgtagctgcaggggtcccagagcaagctagtcccagccagtgatgacccacactgggtaccaactgtagggaagcaaaacagggctttccccaccttctaggtcctttggctgggataggaattaaattgacataaaccagattaacaggagaaaaaccatgtttaattgcatatgtacacacgagagtcccacaaaatatgagacttgatgaagggtcacattattaaagctgatacggcatcctgagctacacaaaggaagaggggccggggctgcagagaggtggtgaccaccagtgggagggcgaggggaggaaatgtatgatgaacaaaagctatcttgctgggcagacaaaaagtcccttgggcaataaaagttgtctggagcaactctctccctgatatagacaattttactaacgtagatttcctttacagatgcaaatttctttaacaaagcaacagcttttcagtgctactcctgtgtctgcagtttctcagaataaccaactcgaaatatgctacagaagtatatttgggggtggcatattctggtctcctaaggtcatattttagggtgctatgtcctgagccccatcagtctacaaaatcatgagagactttgtcaatatacaacatatacaaaatagataaaaacttgaaatatgatatcaaaaaataaatatatataggagttgtaacattttctttccttgctaaaaaggatggtctatttgtttatatcactttgtggcacttagggagtactttgttgtactatagttatctgtgtacgtggtcatctcctttattaaaaagaaagctctttaggggacagagattgcaatatatttatcactagatgtcattcaaccgtagggctttaaacaaaataagtgctcagtaattacctgccaagtggaccctgaacacatgcatgcgtcaaaggccatacgaatgaatgacttctcccaataagccattgttgagtatcgtaaaggaaatgagtttagttggccatgacttcctcctggtgaacccatgctagctgccagggaacactgcttttcccctaaccagtgataaaccatctgtttaataatcaattctaacattttttcaggaatttggccttatgaaatctgctgtcttgaaaagtgagacattggccaggcgcggtggcttatgcctgtaatcccagcattttaggaggccaaggtgagtggatcacctgaggtcaggagttggagaccagcctggccaacatagtgaaacctcatctctactaaaaatacaaaaatattagccaggcatggtggcgcactcctgtaatcccagctacgccggaggctgaggcaagagaatcgcttgaacccaggaggcagaggttgcagtgagccgagattgtgccattgcactccagcctgggccacagagtgagactccatctcaaaagaaagaaagaaagagagagagagagagagagagagagagagagagagagagagagagagagaaagaaagagaaagaaagagaaagaaagaaagaaagaaagaaagaaagaaagaaagaaagaaagaaagaaagaaggaaagaaagaaaagaaagaaagagacagacatctacctgtctccagttgacctctctaatttgtcctgatttcaccaacatccccaagagcatcattgcaaccatatacacgtccaagctcactcagcccaggattggcatagctttgcactggaagacagcacgcttgtgtgctgatggctgattgggaatgaggtggatccgtttggcagagtacaatctctaaacttttaaaacttcatacttctatcagtaaaaatattttttgagtaggtatcttcaatatacgcatattaacatatttttaaatcatatacctgtattatcatgtgccaatacatgatgtaccatataaaacatacaacaaaatagaaatttttaaagggtgatatttttaaaatgtggatacacagaagctctaatgacttctttctgcatccttgtaccctgtacactgctgggttcaaggacccaggagactgcaggacttgtgcttgcaatgaggatgatgagctaatcccccgaaggccagagagggtcacaggcctccagagctactgccttggatccttgaccctgctaccatcccaccaacaggggccgctggtcacatggtcaagagccagcagtaaggctggatttgcacccctgtacgggaagcacagcacgagagcgggggcggtggagggcgatttggatgtcagccctgttttatcccaggctgatctggggcgctccgtgtgtgcctcgttctgggtagtcgctgagcaccgctgagcctgccttgccaatttgtgaaacaggaaagctaacgcctacatgacaggctgctctgagcatgagcggaggcagaagggtaaacttctgcaatatgggcagaggaggtgcccacaaacctctgtctcctctcatacacggcgcatgacctttttatttattaggtggtatctgtaagaaatgaagttgctcagatctcatgaagagcctctgtactgacgcatgggagtattttccttctagcgggtagctgaagatagaattacttggaaacactctagggggagagaagtggttgctgtagataagaaagggagtgggagtgaatgcacaacattagaaaaaaaccgcccaacttggagaagaaacagacatatttactcaactttccaccctccgctttttctccagtgaagtaatctttatattagagatacttttcaatgtagttgtattttctaaatgtattatgcaatgttgaagacatacaaaaatgagtaaagaaaaataaacacaggtatccactactcagctcaagaaatagcactttgggaggctgaggcaggaggatccctgaagtccaggagtttgagaccagcctgggcaacacagcaagaccacgtctctacaaaaactgaaaaaaaaaaattagccgggcatggtggcatgagtctgtagttccagctactcaggaggttgaggtgggaggattgcttgagtctgggagttcaaggctgcagtgagctacgattatgccactgtattccagcctgggcaacagagcaagaccctgtctgaaaatacattttaaaatttttaaaaataaaacactgcccacacagtgaagtccactctctgcaccttctccaccacctccttcctaacccaatattattaacttggcatttatcgttcaagacacttctgtatacttttacaacatatatatgtatccccaagtagcaaatagtatctttttgagtattttttgttttgtcttgttttgtttttgagacagagtctcgctctgttgcccaggctggagtgcagtggcatgacctcggctcactgcagcctccacctcccagattcaagcaattctcctgcctcagcctcctgagtagctgggattacaggtgcacgccaccatgcctggttaatttttgtatttttagtagagatgggatggggtttcaccatgttggccaggctggtctcaaactcctgacctcaggtgatccaaccgcctcggcctcccaaagtgctgggattacaagtgtgagccagcgtgcccagccctttttcagtatttttaaacttaaaaagtcttataattattattatgactttgggtcattaactcactcatgcaacacatgtttataaagcacctactatgtttgttgtgccatgagtaatcataacaaaaagtctcttcactttcaagtcctggaaacatgtcagcacaaactacattaaaaatgattcctttgcaaattcattttaagactttgcaaattctcgctgctttcatgtcaccactcctatggaaacagaaattctatttccacagaaaagtcactgttctgtgattaagcaaaacggtggtagataccatgattcaagggacaggggggcattctattctgcataaagatgggtcacgaattctaaataagtgtccccagagaaagcaatctggggctctaggaaaggtggagcctctgccctgaccccgccttcgccactcttattttctagacagcagagttcagcatagtgtgggattctcctgaatctcattcaaggcatctggtcaggagtgtaggtgaaagacccactagctccccgggatgtgcctgagctcacagagcgtgaaggcagggggtgtggagggctggctgcagagctggggctggctggctgtagggcctggctctctttccaaggttctagaggtggggtccactcgagggtgaagggcccccatttcttgccttccactggtctcaagtggctggggcaaaaaagtgagcccaaatttcacaagttaccaacagagtaacctaaagatgacccttcagtggcccctgagcgtggaggccacaacgggagggaagtccttggggctgagcccggctacttccaggtggaaacaggaacttcggccgcattctgctcaggacccagagtcaatgctgcagccactgctcgcccgactaggacatttttgctcttccaaatgcacttccattctagtttcctacaacacaggcttctagctaaaaagattttgagctcatgatgttactgttctgtggattaggtaaagaaatgtacttctatgaatgtaaatgatcaatactctattaatctttcatcacaattattagtaagctgcaaaacctcgccagctctgtcccccctagaactggccttggggtcacactttcactttaatcacactctggcctcccatgtccaccgtacagtcagaagtcgttttggccaccaacagttcagtgtttccgcaagtctctttgtggcaactgcctctgagaactgtgtcctgttgaccaagctgagcttctcagtgaaccaccaggcctgagctcaacacttgaaacaagtccattttctcctggtggagactgcacagcgtggtgggatttcaccttaccctttgatatggtttggctgtgtccccacccaaatctcatcttgaattgtagttcccataattcccacatgttgtgggagggacccggtgggaggtattgaatcatgggggtggttctttcccatgctgttcttgtgatagtaaataagtcttacgagatctgatggttctataaaggggagttcccctgcacatgttctcttgcctgccgccatgtaagatgtgcctttgctctcctttgccttctgccatgattgtggggtctccccagccatgtggaactgtgagtccattaaacctctttttcttaataaattacccagtctcgggtatgtctttattagcagcatgagaacacactaatacacccttggtcctgcccactagtgactttttgtaggcaattaacaagcctttagtcctaatccaaagaggcctgatgacttgggaatgtcagaactaggaaatgtatgcccctagcatccaatcctatagaggggaggggtccttggtgcccccaacctgccagctgtgagatttctaatcctccctttgctgactgtgcaattgccctatttttctagaaaaggctactctggcccattgctgattgtctatgaccccatggggtctaagttactcactgtaactgtccccagagaaaacaggctggggctgtaggaaaggtgggagctctgccaccttgatgtaacctcagagctggtcccttcctcctcaggtcaccatgctcactcctgctgcccaggtctcaaagacagcctacaccacccactccctggcttagcaccatcccctgccctctgtctctgctgcctgggcctctggattcccctgcaccccaggctcactgtgtgctgagcgtcccaccgtcccaccagcacctcagccggcccttctccaaataaggaacaacattttcttttctagtgataagaataaatcatttcattgaaaataggaaataccaaaaagtaaaaagaggaaactaaaaatcacccataatctatcacatcctaaacatgatttacattttgatgcatttgcttagtcttttttctttgcacatgaataatacatgttttcccagaactggaattataccatgcataatattttgtacccttcatttttttttctagccttgtcgtaacaataaacattctgctcttatccttggatctccatgtgagttttcaaattcccctctcctcccctccatccatctaaatctttccctgcctttaattctccatcccgtaaagccttgcctaataattctggtctgtatgtatgttcctgtcaatatgtttagcctttgctgcacagattgcataattcactgcttgatctattgtcttttctaatgactttgagaattggttttctgttgctggtaataatataagcccttaataatcagcaaccttgtcttacacatagtagtgctcagtaatatttgctgattttcagattgcttcacattatttgagctccatattcccctaccctttttttgtttctatgcaaaagtgaaaattctcagacaaggttgctgggagccaggaataaatacccatctaatggtagcaacacttgtaagaaaagtacaggactcacatcttgcgttttcctaatccagcctttccccttgctggtgtgaatgagatgtatgcctccgccagagtagctggccaagatgcacccacacaggactgcgagcgtcttagactgctctctgagttggaatttagggcctgaattagtcaagcatcaaatgaagaaataatgagatgcaaactctccacatactatcttcacagctttaaaataaaacaaaatgtaatggcctttaaaaggaaatgtaggttagacaggattgcaagttaactacagttattttataacattaaagtaataaaaggtattttttgacctggttttacaaaggctatttcttcacacacatacacacacacactcgaatacctacccatctccacacacatcccctcatatatacacactcacacacactcacacgcacacccactcacactcacacacatccacacacgcatacatacacccactcacacaccccacacacatgctcacgcccacacacatgcacactcacgcacacacccacatacacacacgcactcacacatgcacacacgcatacatacacccactcacacaccccacacacatgctcacgcccacacatgcacactcacgtgcacacacccacatacacacacgcactcacacatgcatacacagatacacaccgcccccgccccccaacccccgacacacacacccttgcccaagcaataaagaggaagcccccactgtttgcaactctcctattaaaacagactaagatcattcagggttcagccccgccccagggccgcgagcgctcagggattttgattccagaccctgggcaccaggttggaatcaaaatgatggagttcccggtcggtcctccagtgctgaatgtttaatttcctatgaaaggctgcgagctagaggaggaagcaggaacacccagcgccgttcccgcccatcctcccgctccgccccgctccgcccgtgctgggctgtggcctccacaccaagcagccgccctgggccgccttccttcgtctgtgcgtgcagcgccgcctccttcagcttaggcccgacactccatgaactctcattttccaccttctccgtctccagcttccaagctgcacagggccaggccgaggtacgtgatggcgggcactgaattacagatcccgtctgtggccgccagcctctgtgtcctgccacctcctccgagaggacatcaccgccaccaggtggagcgagtctcctcctcggcgctccaaccacgtgctgtttattactctgtggggattcccataccgaggcctcttcagttcctggaacagtagcactaaaaggctcctgagtgcctctgttaatttgattgttctggttcgcactacaatgaccgggctggagagggggcgctcgtaatgaaacaggaactgctcctcgcgcccgctccagagtcctttacatctttggggagagggcatacggggagctacatttcattttcctgaagattttccacgcgaaagtgctggggagagagttgggcctgggaggctgcgccttcttcccgcgaatcccgaaaactgcgcggcaaaggcgggttccgcagaagtcgcgcgtgacccggggcgccgccctcctcggggcccattcggatctgccgcccgtcctctccagagcgccccctggcgccctctaggccatcttgattccaccgccgcagttgaaagaattaataaataaatcctagtctcgcgtctagaccggtccgtgagggtcccctgctcaccggacaccctgccgcaatctctgctgtcccattctggcctccctacggggacgggggccaccgtttgcacatcagcggcgtttgggacagcactgtgcaagatctgtgactcggctttcagaagcttctgccacaaggcttcaaaggaaaccttcaattttcacatttcctagggggaaaaaaaatctgagatttcttcttgtggcttgatgaacttagctttcgtcgctggaacaaaacccgaggaacagcgtcttcgccacccttgccaccttactgatgtttctcagggggcacatgcccatcgcaaccttatgaccaatcccatttttcagatgcagaaagaggctcagagaggttaagtgctacttgctcaaggccacagcagggagtggagctggattcgctcccaggcaactgaccccagcgtgcagtcgatgccttctcctagtcccactcaccgtgtaagacctggtatttacaaattagattctcgttgtgcttctccattggaagggcactaggggagctcattgtctaagactgccatccctaactgccttttaaaaagaaatctgggccgggcgcagtggttcatgcctgtaatcccagcactttgggaggccgaggcaggcagatcacgaggtcaagagatcgagaccgtcctggctaacacggtgaaaccccgtctctactaaaaatacaaaaaattagccgggcgtggtggcgggcgcctgtagtcccagctacttgggaggctgaggcaggagaatggcttgaacccaggaggctgaacttgcagtgagccgagatcgccccactgcactccagcctgggcgacagagcgagactctgtctcaaaaaaaaaaaaaaaaaaaaaaatctgacgtgacaaggcctttagtttttataagtgaggtctcctctctttgcctagatattcctccgataacatcaatgaaattttgcccagcacagagcaagtactaaataatgatttggtgaatctaatgttgagcctgcagtaatccaactagaaacacccactcagccactcgggcataccttttatttgggcaaggggcactgcagttctctgggcaggggtcagctaggagagaccaatagatgcccccaccccaggctcctagacccatctccaggaccaaacagccaaagcccctcttcttttcttcaaaatacacacatttctagaaattctctgcaaaatacataggctactagataagcacccagtttccctctggggtcatttgttcccgaatgaggcttattaaaagaggaaactatttttaagctaaatcatcaatcaaaagtattcttcattctggtatatggctgctttccacagatgataaaatcccgtcaacttgatccaaagaaaaaatgacctacataacaatgacagcatgaataacaattaatcctccattgaaatgttcaaaagctagaattgtggtaaagccaagattcccagggagtgtcaggaactgctctcttgattctaagcttgaagcaggtaaagaaaaggttgtctgggactagggctttcggggataggacccaaatcccaaggcaaagggagtcagaagcgagtaagaaaagcaaacagctcctacctacccagtgccaaagaaacgcagacaccagttctgtgtcggttctgcttgaaaaggtctgagaagaataatttggtagatgaatcattgaagaataattttgcagacagctccatcaagccaaatgcccagcgtgagggctgtgtgtataatactgtcataacctttgaagatagattctgttcatcaacacggctgtttacataatcacttggtcacctcaccaaatggattaatctttttggtcacattccttatcagtgcatggagaggctaattgttggtggcccaatgtgtcccataaacggatcccatgagaataagcttgcagcaacagatgatgaagggaactgagatacagacgaaagcacagcggcctgggagacaggagacgaggctccgcctggaccttgacgacgaccttccttaaaactatggactcgtcatctgacctctcaaggcctccatttccccatctgtaaaaccgaaagcccctcagcaatctggggctatcatctgaaaagtgtgggcagctgcgggcgctcatacctcaagccccaagagtttcttcttctaacagtaacatactttgcacatgacccagcaatcccactcctgggtatttacctgataaatgaaaacccatgtttgccgggcatggtggctcatgcatgtaatcccagcactttgggaggccaaggtgggcggatcacttgaagtcaaaagttcaagaccagcctggaaaacatggtgaaaccccatctctactaaaactacaaaaattggtggggtgtggaggcacatgcctgtagttccagctactcgggaaactgaggcagaaggattgcttgaacccaggaattggaggttacaagtgagccaagattgcgccattgcactccagtgcagagcaaaagtctgtcaaaaaaaaaaaaaaaagaagaagaaaaagaaaaaaggaatgaaaggaaagaaaaggaaggaaggaaggaaggaccattaagaaggtacctgtacccaaatttgcagagcagctttatttttatttatcaccgccccagactggagtcaacccacacgtcctcagcgtgtgaatgaatagaccaaccgcagcacctcgtacagtggagtgctactaaggagcgaatatggattcacacagcaacacgggtgcatcccaaaagcatgctgctacacggatgcaaggccttcggactatatgatcccatttaggagacaattgggaaaagggaaaatccaggggtgaagaatagatctgtggtggcaggggtgggaaaagcggggaggatttgcctactgaggggcagcacaagagaattttgcggggcgatggatctgtctgtatcttgaccatagtgatgatacatgactgtgcatttgtcagaactcacaggactgaatgaaaagagaagtgaattttactgcatgtgaattgttaaaataaatgctagacagtattttaaaaatcaagcccagatcctgcaagacattatggctccccaccagaaggggagagacggggaaagagaagtgtccccaaagttaacccacgttccctgggacccacctccctccccactgccacttcccaccagcctcacgcacgggccaggcccttccctttgcagctcacagcccagcagatgttaggtcagaatgcgtcccctcacttgactaaaggtttacagccagcagggtggaaatgaaccagatattaacaccccctcctccatgccctgcccaccttctggccagtaccagtgaagcagaagccactctcccacccccaggctgtcccaaagccctgaagacccaagaaagcagagccaagtggagtgaccctgataccagggccagctgcccagtcccctgtagctggggaggaccccctcttcttgtgaggcagacactgggagtgacccctccctgcaagggagatttctcatcccccagggttcccagagggttcccagaggaaatacaggatacccaatacatttgaatttcagataaaaaataaataacgttctgatacaagtctgtcctgtgcaatatttgtatgtgtttttatttgctaaatctggcaactctgtccccacccacaggggcatgcctatggtcaccacaccagaaggtaatccattacatctcagtaactgtagatccatacacccagataatttgcttcttggctcatctcctgggaattagagaactgggtctgttagccaaactctcaagacacctgccccaaaacaacctggggtgctgaggaaggggcacaaaaggcaaacagcatgccctctccaactcccacccctaccacaatctgagcttagaagccagatgtgggtggcgtgggagggaaaggcacaccagcctgagcacctctttctgagcaggctgtgtggagcgaggccccaggcccatcccgggcctccctccagcacccatcagaccctctcagaggacacagcgatcacccctagagacccctagatagactctgcacccagcccagcctcccaggtctcccccagtcacccctggtggcccacagggatttcttcaccttccaagtgccccgtggtgatagcaggtgtctgggggtggtgaaacccacgggtctgtgcaatgtagggaagggggtggtgcctcctttctggggctttttattttgccattaacaaaggaaaaatctgtccagaatttatattaaaagctccagcagatgctaagcagctggtctccatctgcaaggttgatgcaacaaggataaacggaagcgtggggatttaggttagcttagacatgggaaagggagttgtgaaaagaaagaaagccgaagatgggaatggtcaccgtacaagtctaggacatctccttgtccctgggtgtcccaaagatgggctagagtttgcctgatgaagggccctatccattcatcagtgaacaggcagttattaggcaccactgtgttccgggctctgtgttggtgctgtggctgctaagatgtgtacagaacaatcctggcactcaaggaggtcgtgttctaggggacagccaccaccacaacggggcaagcatacagcagagtacaggaatcctggagcgctgaggagctgcaggattggactaagagccccgaggccatgcctgacactagtatgaaaggaaaagcagaggtcagccaggaagaggctgcggagggacggggtttcaggcagagggccctgcgtggataaaggcatggaggtgagaaaccgctggagtacatggggaacatggtgtggcttgggtgtgacatcagagggtgagagggcaccagatggaggcctagcatgatcagcagggggtttccccctgtcccaagcagctggagggctcccagcaggtcagagccacagggtcctccatgcattttggaaaggtcactccagcaggaggagggtggctgttcaggaggctgtccaggctctggctgccgaggcctccacataggccatggccacggggcagaaagcaggggtaggattgagaaaacctggaggcaatgccagcagactcgggagaataacaggatgtgggaggtgaggaagaggcaggagaagatgagcttcaggttcccaacaccagcaagctggctaggagcaggcaaatgacgcggcgcccatgtcggaggcagcactggggttttgttcttgcaaacccctggctcatgccgaagacctgcctcggccggtcaaaccccatccctaaacccaggacacaagtcaccacagagcctgccctgtggtctccagcctggcctggcctctccgcagcgtttcagccacagttgcacaggtgcggctggacctggacctgctgagggaggttctcagggtccggagctggccttaggtggtcaccatagtgagatcctgaaggcttcgaagaggccacaagaagtacaggaatatagcccagtcttagcggaggccatgcagcagatggggccctggggagggattccggagcacctggtcccatgctggggctcagcatcgctgtctgtccagggatgagcatgcaaaggccacatcctgctgggtctaagctctggatcctgttgaggacagaactcagcaaatacagctcagtgctgccgcctactgctcacctcttgccattacacactcagtgcggggatcatccccgctgcccgggagaagctggaggggcagggtcctgacccagaatggacatcatcctgccccagaacggctaaaggacctcacgaggcttccctacaactcactgtctgatttgaaggcagcgagatggcgcttaggaattaggtcagagcagctacaaggggcgcaggcctagaagcaagccggtgttctggccattggagggccgggggtcccttagcagaagttagcaggtgtaagcggggtaggtggctcatgcctgtaatcccaacactttgggacgctgaggcaggtggatcacctgaggtcaggagttcaagaccagcctgaccaaaatggtgaaacccgtttctactaaaaatacaaaaattagccaggcgtggtggcgggtgcctgtaattccagctcctccagaggctgatgcaggagaatcgcttgaacccgggaggtggaggtagcagtgagctgagatcgtattattgcactccagcctgggagacacagcgagactccgtctcaaaaataaaataaaataaaaattaaattaaaaaaaaaagctagcaggcgtatattctgcaaagaccttcgggccgaggctgcagtcaccttgttacagaggcttccgcagaaaacatccaggttttgagggggcgaggggaggagcggggagcaggggatgctgctgccagcagagcccacactggccgcagggctgcttctgtgcagcctgcaccaagaatggtttttacatttttaaatagttgagaaaaggattcaaagacagaagaatagatgcaacctagaacatgtggtcctcagagtctgaaatatttactatgtggtctttggcagaagtgtgctgcctcccagcctacacaatggcccagacatctgtcacctgagatggttgttcagggtcaggcacattgtcacggagaagcctgcagtgtcgccccgcctgggaggaccctcatgcccagcacaagctcccagagtctcccataggccccaccagggaggggagagggcagggggagaggcagggtagccggaaggaccacggctcaggtctgatctgctggtctgcaagcctctctctgggccgtgtccagcacagatgttcaggtcggggtggcgatgcttcccctggaactctcagggacgacacagctgtcagaggccccagcaagtcacttcagccactctgggagactccaactaggccggaagtcccccagaacccacagcatctcacgggacgtgccagagtggcctccttcttgctgcagatcccgtcgcaacaaaatgctgccgactgctcagtattttcattcacaacccaaagaaaaaacacccctccatgcttgctgtttgaggggagaggaagtcattcgtcacatacattcattgagcaaggtttccattctccagagatttcttgctctgtctcctgtctgcaatagcagggaccatgtgactagagaggaggaactcattgtggctgcaggcaccctgctgtgagcacagccgtgctgggcccttccttgacaccgcccagcaatgtggccgggctcccggtccccctcccctgaggtggtggtgggctcctagaccaagttccattcttcagtgccctggcttccaaccggcgaaaactcagcccgggctaaggaccatgagggcaggggcctctcaaaaggagggtaagaggtggatgcagtggctcacacctgtaattgctgtgctttagtaggctttgcttggggccaggagttcaacaccagcctgggcaacatagtgagactcctgtctctataaaaaaaaaattttgttttaattagccaggcatagtggcacacacctgtaatcccagccactcaagaggctgaggcaggaggatcacttgagcccaggagtggaaggctgcagtgagctatgattgcaccactgcactccagcctgggcaacagagtaagaagctatctctggggaaaaaaaaaaaaaaaacaaaaggagggtaagaggtttccaaggcattgcgcagagcatgggcctggggtcctggtctgtggtcagcagttgtgtgacgtccccccaagggcaatgagcattggttaaatgagataaaaccagcaaaacgtccattgagagaagatcctcaataaatgtgtctttcccgtacatttccttaactggtaaaatggagataatatcatcaacccctttctcacagagtaattttaagtctcaggtgagacaaagaatgcaggagagctttatagctataatctctatagtcacaccttcatccagcacttactaggtgccactcacaaactcagttccgggacaaaagtgaacaaagacagaagcagtccctgccctggtgtacatttcagtctacttttcataacgaaagatggtgtgttttttattacttgcgctgtggtccttttgctcaggagttgggggggaaacacactgacacatgggcttcctagtccaccattagtgacctcctgatccaaggatggttatttgaacattcatttctccacctgtcaaatgggatatttgcgaaaattaaatgaaataatatgtatgaatacatttagccagtccatgcacatggtagagcttaaaaagtgttgatttaggccaggcatggtggctcacgcctgtaatcccagcactttgggaggctgaggtgggtggatcacttgaggtcaggagtttgagaccagcgtggacaacatggtgaaaccccatgtctactaaaatacaaaaatcagcagggtgtggtggcaggcacctgtaatcccagctactcaggaggctgaggcaggagaatcacttgaacccaggaggcagaggttgcagtgagctgagatcacaccattgcactacagcctgggcaacagagcgagacgcatctcaaaaaaaaaaatgttaatttaatgggatgacacctggtgaacaccgtaagctcattcacctgaatggccaaggctgcagggcaggctctggccacctgagttttagaggaggggtaactggacctcagacatcacctcctccacacacccatcttctcctgccatttgtggtccctccctggccccctcaccagtgcctacaaagacagtgctcacagacatgttaataacataaattgccactgtttattgagcattttacatgctccagacacccatcccctcactttatcctcacactgaggatactggaggtactattgttatccttttttacagatggggaaagcggggcacagaaaggtttggtgaattgcccaagatcacacagctggtgtgagggtggccaggatttgaaggctagtccatctgaggacatctgaagttaatggtttccacgctgtaggacctgaataacctggatggccaggagcccagggtatttgtaaaacatgctctactagtaaagctaacatttattaatagtaagcacttaccgtgtgccccagactgctgtattatgttttaaagtgattgttaaagatgtaacaatgggctgggcatggtggctcacgtctgtaattgcagcactttgggaggccgaggccggcggatcacctgaggtcaggagttggagaccagcctggccaacatggtgaaaccccgtctctagtaaaaatacaaaaattagccaggtgcggtggtgcgtgcctgtaatcccagctactcaggaggctgggcaggagaatcgcttgaacccgggaggcagaggctgcggtgagcctggatcgtaccattgcactccagcctgggggacaaagcaagactccgtctcaaaaataataataataataataataataaaggccgggcgcggtggctcatgcccataatcctaacactttgggaggccaaggtgggaggatcacctgaggtcaggagttcaagaccagcctggccaacatggtgaaaccctgcctctactaaaagtacaaaaattagtacggcatgatggtgcatgcctgtaatctcagctacttgggaggctgaggcaggagaatcacttgaacccagaaggtggaggttgcagtgagccgagatggcaccactgcactccagcctgggtgacagagtgagactccttctcaaaaaataaataaataaataaagatgcaacaatgactgtaccacctgcaccagttagtagccatgctgcagaaagagaaattcacctgtctcctccatgtgtcagtaacttccagttaaaactggtgcttttatataataatgatgggagctaggtagatagtactgaccctgtgccaggcatgatctgaggactctgcatgcattaactaagatgggaccaactgttatccttacttcatctgagataaggaaacccagtcacttagccaggttccctggctgttggtggcagatctgggatataaacccactctccgcccactcattacacctgcctaagctgcagtgggctcagaggccattgtgaagcagacacagcagacccttttgtcctcagaaaactgtgaaacagtgtttagcaggaaacaggcttggcctccccgaggccctagagatgattttcatatctttggaaggcacatatcggtgggataaaaattcctttgcagaaacattgcccaggaaagtgtattcagccccaaatcctcacccactgtgggacttcatccgcttcaccaatgacttatgacaaccacctcagccaaaatgacattccagaaaacaaggggtcatctgtcaaggtggccaaagacaaggaaaatctgagacaccgtcacagccaaaaggaacctaaagaggcatgacaactaaatgtcatgtggcatcctggatgggaccctaggacagcaaaaggacatgaggaaaaatataaggaaatccgaataatgtatggacgtctagttaataaaactgtatcaacactggttcattcattacaacaaatgaagcatactcatggaagatgttaccaatagagaaactgtgcatggggcttatgggagctctctgtacaagctttgcaatttttctatagatttaaacttgttttttttttcttttaaaattatttttattttttaaggagatagggtctcactacattgcccaggctggagcgcagtggctattcacaagcacgatcccactaccgatcagcacaggagttttgacctgctccatttccaacccaggttggttcacccctctttaggcaacgtgctggtcccccactcccgggatgtcaccatattgatgctgaacttagtgtgggcatctgattgacatagcgcactaaagcccagttctcctgcactcaagcgatcctctcacctcagcctcccaagtaactgggactaaaggcacactctttaaaaatacaatgtgttataaaaaatatatactcattaatgatactacttaattttgtacctacctctttttttcacatttctgttagtcttagctctgactgctataacaaaataccatagacctgatggcttagacaacaaacctttattcctcacagttcagggggatggacgtcagaggtccaggtgccagcagatttggttccgggtgagggctgtcgccctggcttgcgggcagctggcttctctctgtgtcctcacactactgagaggggaagctctggtgtctcttcgtcttctaagaagtcccatcacgggagctctaccctcatggctcaattacctcccaaaggtggggtctccaaagaccgccacactgggaactagagcttcaatgtatggattgggagcagggacccaaacacgcaacccataatacaactgaattccataagagtatatcaacgccaagaaaagagtggcccgcttgaaacgtcggtaatccttcctttcacctcatgcctgttaggatggccatattgaaacaaacaaggagtgctggccaggtcatggagaaatctgaagacttatccactgatggggaatgagaaatggtgtcgctgctacagagaacagtgtggagggtctttcagcaattactgcgaatctaccgtgtaacccatcatcagtcccacttctgagtattcatcgaaagaacaaaaatcagaatttccaggagacacctgcagccccacattcactgcggcagtattcaccgcagccaagacatggaaacagcccacatgtccaatgtaaatgaatggattgagaaaatatggtctatccataccacagaatattattcagccttgaaaatgagggaaatcctactgggaacttggaggacattacacttagtgaaataagccaggcctacaggaacaagtgctgcatgattccacttaaacggggaactaaaatagtcaaacccataaaagcagagactagaatggtggttgccaggggctgagtgagggagagctggggatttgctgctcaatgggcgtaagtttccactatgcaagatgaatgagttccagctatccactgtacaacatgctacctacagtaaacaataccgcaccaagcactgaagcatttgttgggaggatgactccccggctaagtgttcttaccacaaaagcagacaaacaaacaaaaaacagtggcatacaaggacacctttggaagtgatggatgtatctattaccatgatgataatgatggtttcacaggtgtgtgcagatgtccaaactcatcaaatgtatacatccaatacacacaggggtttttttttgtatatcaattacatatcaataaaactgtaaaaaaggaaaaggaaaaaaatgaccctttccgccacacatcaagacggctgcccctctctctatttcctcctcaaagggtaaacccggagacatggtcctaactggtaaccacctgtggccaggaccctgaggcacctcctggggcagagaagcagctcatgtcacctgccgtggggactcccccagccagtgcagctctatcctgctgttgctcctgttgctggagtgacagtggcatcgtgtgttcaaacccacacacttatctggacaaggatgagagaagccagggcagcctctgtggtaggagcggctgtagagacaccttggctggaagcaagaaggcactgctctgactgtgacccaggccaccccaagggaggcagcaccccaggaggcaccagggtggacagggcaggaagtaaagcgttgctccctgaccagtgctgtggctttcgagtaaagatctggaatgaggccaggcgcagtggctcacgcctataatcccagcactttgggaggccaaggtgggcacatcatgaggtcaggagttccagaccagcctggccaacatagtgaaacccccgtctctactaaaaatacaaaaaattagctgggcgtggtggtgggcgcctataatcccagctacttgggaggctgaggcaggagaatcacttgaacccaggaggcggaggttgcagtgagccaagatcacgccactgccctccagcccaggcaacagagcgagactctatctcaaaaaaaaaaaaaaatttttggaatgaagccctggctctgccttttcttagcacaagcaaccatgggcgaaccacatatccctgtaagcctcagtttcttcatctgtgagatggagactctaagagcgcctgccttgcgtcattgtggtggaggttacaggaagcgcatattagtgcagatgtggaggggcctcccggggaattaaacacagaaacagttaaggcagctttgtttgggactggggctgggcattggaaggcgtggatttggggagtgctgctttcactgaactgtgtgaatctattatttagattatttagataaaattactgaacacatttttggggggttgttcatttgtttgtttgttttgagacggatctccttctgtcgcccaggctggagtacagtggcatgatctccgctcactgcaacctcagcctcccaggttcaagcgattctcctgcctcagcctcctgagtagctgggattaaaggtgtgcacaaaccacacccagctaatttttgtatttttaatagagacagagtttcaccacattggccaggctggtcttgaactcttgacctcaggtgatccgcccgcctcggcttcccaaagtgctgggattacaggcatgagccaccgcgcccagccaatgttcatatattttaacaaagtatgcttacattgccttaaattttttatttgtgcaaattcatgcggtacgtgagagattttgttacacgtatataatgtgtagtgatcaagtcaaggtattcctgtgtccatcacccaagtataatacattgttgtgaagtatagtcaccctgctctgcgatcagacattgaatctgctccatcttactgtgcacttgtaccctttcacccacttctcttcatttcccccccacccactccccgcccaccccacactcctcccagtctctgttatctctttctgaatgcgtgtttaaagggggggccctgcagcaatgctctcagccctggtccagcacatacagcaggcacatggtccatggtgcagacagggcagctggggcgatcagaagattcattccgctgctggaggcctcctcaggccttcctggaaaggccaaacagatagcggtgataggaatctagaaaaatctcatgagagggactggcagacactaacttgttcaccaaaccccacaatgccagatctctccgctctctctgccagagagcagctctcttcttcaaggcgattttaggacaaatttgcagcagcttatacatgtacggatcttgttaactcaagatacgtatgatgcaggcaggaatcagagagagacaggtcgggaagggtctccataaatctcatgccatgaaatcacacatttgtcactgagggaagccaaggaggtcttgctctgtcacccaggctaaagtgcagtggtgcaatcatggctcactgcagtctccaactcctgggctcaagtggtcctcctgcttcagcctccccagtagctgggactataggcatgcatcaccacacccagctacttttgtatttttatagggatggggtcttactatgttgtccaggctggtcttgaactcctggcctcaagcaatcctcccacctcggcttcccaaagtgttgggattacaagcgtgagccacttcacctggcctgtccctgccttttgagaggagggcatctgtgccctgccctggtccagctcctcaccttggcagatcttggtatcccctcggggaagtctatagatgaaccatgggtgcgacctggtccaataaggacagtcagaaaaagctatattggaggtgttggcgaatgggtagatccaggtcagaaaagtgggcagatgggaacagagaccctctgtacctctcggcccaggacaaacaagtagagaggacaccctccccaacctccatcgcctgagccccagcctccccacccagccatacacaacaggcacacacccctccccgcaactgatgcacccaccacacaccccccacacacacactgccacaggggggcgggcagcacaggagctgcggtcaaagcctcggggccccagccctgccacctgtctctaacacgatctcgggcatgccccagaatctccctgagcctaggcttccacagctctgagtacggctctgcctccaaagagacgtggtaatgaacaaataggaataaaaagtctctaaagagctttgtaaactgcaaatcagcttatcaatgtaagctgtttttgttcttaatgaaatggtcctttcagcattggaccccagaagatgtgatgtcttggtccaaggaagttagaagggggtgagtgagagacagccagagggaagaagagctgggagaggaagacagatgagcaggagcccgcctcctgtccccgggatgcgctttctggacctgctgcacacccactggtcagagatggaatctgcaccagccccaggattgcaacgcggaaaagctgcctctactcagcagatagaccaagttcctgtttgttttgaaagagacactactcctgaaagcaactggtagccaatcatgtcacacaaagacgtgaattccaggccaggcgcagtgactcacgcctgtaatcctagcactttgggaggccgaggcaggcggattgcctgagctcaggagttcgagaccatcctgtccaacatggtgaaaccccgtctctacaaaaatacaaaaaattagccgggcatggtggcgtgtgcctgtagacccagctactggggaggctgaggcaggggaattgcttaaacccacctgggaggcagaggttgtagtttgccaagatcacaccactgcactccagcctgggtgacagagcaagactccatcccaaaaaaaaaaagaaaaaaaaaagatgtgaattcctgaaccaatcgactggcgatttctgcttgtattctcttttcatttctcctgcttgcagtggtctcgcggggcacagtggggtctcccctcaaggaggccaatgggactgaccatggtgtggtgcgtgcctttggggagaagagtctggggcttgggggggtctggatcatgaaacagtgactcactcccttcctgctgcagttgcacccactctgttagtgaagaagggagaaatgattaactaactctaggatcctggctcatttgcataaacgtgcataaattatgtctcctcacgaaatgatctgagcatgagtaaaagcaaatgggaatgtgtttttctgttccccttctccatctgtttttctccttcccctcctgctacttccataaacataccaaaaccgttttcagcttcccatgcggaaagtacatgcgggtgcatgttttacacagggatttgcagaatgttgatatatcagggtcaccaaaagtcctgctttcttccatctttttccccctaccttctctccatattcatttctaccattttctctgcaaaatagaagtttcagatttcagtgttcagcatgcatggaagctgataattcttgagctaacagggcacaatgatggaccagccaggaggctccataaactgagggatgctggctgcctgcactgcactgtgtctccagggtctatgattggacaaacaagacgcctctggccattttatgggggacaaagcaggcctgagtatgactgtggtgtggctggatttacaaagcttattacagactaagacgaactgctgagcacagtccagggtcctgccgcaaagcccagagctctctccagcagcccacactgcccattatgctggcaactagctgaatgggcagattcacctatgtgcccttaaaggccctttccagccatattcacccacagaacagagcaccagatgagccgggcctggagctacgatggcagagctctgccaaggcccgtgtgggctgcagctcgtgcagacgtgtgtcacctgccccatctgagctgactcctgaaggcaggcaactctgaaggctcgcaggggctggcatttgtcccaggaacaggggccaaggggaaattgcttcttaattactgcttacagtgcaagtttttgctttggcttgggcaatagccaatcccccaaaacacattgagtctcttatcagcctgcagttaattgatcctgggaattgatccgtgccttatccatggattctattgtaactagagaagctgcagcaaccacccctggccacaggctgttctcacagctggaggataccctacggccctcatctggacccctttttcccacaccctcccaccctgctctgcagatggtctgcagccaggccctcctcattaggagcctcaagcacacagtccaccctacctggtctgttccacatggcccgggagcctgaagaaagctcagctccagctcacaacccgaacacctcggcctgccactccctgcaacgttcacagagtaccattaccatcgcctctcatggggttttcacacacagcccttgaggccagaaacaaaagcaaaacaatgtgactttctcaccttccagtgaagaaactgagatttaggccgcagaacagaatcacaaactcagaaccccgacagcaaataaagtagggtaatttaatatatctagcactgacaacaaatgaccccaaaatctcagtggcttaacactaggagttcacctcttgctcatatcagtctaatgtgaaccagctggctttccaggcggctgttgtccaagtggacacttagggatgacaccttcagctctaaggtttacctggggaggtgaaagcgaggaagacggtgcaggtggatttatggccgggcctgaaataacacacatcttgtctgcacacatttcactggccagaatcagtcacatgattgctgactgcaaaggaggccggggaaaacggtcttcacaggggaccaggagaggaaaacgcaggtaagcatccacgagctgctacggaggtgataatgacactgacttttattgatggaattctgtaagccaagtattgtgacaggagctatataagcatcacctcattcaatccccaagacagctcgtgaaagattactcatcttcattttacacatgcagagattcagagatccagcaacctgactctaagttcctgctctaacgtaggaatatagtcttcttgtgcaaaattaagacattacagagcggcattcttggccaccgtgccttttatcccagattccccacatacgcacccaaattcaccagagctggcagtgtgatgtgtgtcctgaatctgtttgtatgtgcatttaaaatgcatgtactcatatgattatctgatagatttatcattttctttaaaaaatagaactgtgggccaggcgcagtggctcacacctataatcccagcactttgggaggccgaggcgggcagatcacttgagaggcagatcacttgaggtcaggagtttgagaccagcctggccaacatggtaaaactctgtttctactcaaaatacaaaacttagccgggtgtgatggtgtgcacctgtaatctcagctacttgggaggctgaggcacaagaatcacttgaacctggaaggtggaggttgcagtgagctgagatcatgccactgcactccagcctgggggaatacagtgagactcaatttcaaaaataaataaataaataaataaataaataaataaataaataaaactgtgcaatatacattattatgcaacaaatatctagcacattcctctgcataaaacacccagtgatttttttctatcagatcacacagcttcccaactttccaccgtagagtaagtaatccctttggactctagaaggttcttggctaaaatgcgaagacctcacaggggaagtgggaagcgtgaagcattaacagtcactcacgcctgcgtgcagcaccattggtccctgcagagccgagcccagggagaccaggcccaggactgacgttgctgatgcccttccccagtggccagccctgggcccctggcctggtttgggggtgctgtcgtctgtgccctgagaccctgtctctcatcaaattgcccagaacactgggagttgggggataaatggatcttctccttccaccttgaaggtgaagaaaaatatctcaccctttttgaaagagagaccagactacatcaacttgaaaatagccccaggtctggacagctgaatttactgctcttaaggtgatctcatgcaatccttatataactgtgcagacagcctggtattggtatccgcattttacaactggatacatcaagtccaagcagggagtaggtggccccaggctgcactgcaaagcccattccccactgcagggaacgttgcttcaggggccctgggccagacccagtctccaggcctgtgaccattgcccctggtgcgacctgcccccatccacctggagcttgacctgcctctgtccacctggagcattattgattgaagtttccaccctccagggccagacagggcaccagggactggaatcaaacccaaagagaattcaaaaatgactaaactgtgtgaacttggaaccaagcttcaacattattttagggacctttgaaccacatttggaggggctcacttcatatcctctgcccatcttcgaaggcctaacggaaaccttctgggtgaggctgccctgatgtctgcactggaagggacctgtgctcttctgaactcacacttactgtctgtacaagtaataggccagtttatcaacctcatcccatggcagctcttctttggccttggcctttggccttgggctgtggtgaaaccccgtctctactaaaaatacaaaaattagccgggcatggtggcaagtgcctataatcccagctaccagggaggctgaagtagaagaattgcttgaacccgggaggcagagactgcagtgagctgagatcacaccattgtactccagcctgggagagagagcgagacaatgtcccaaaaaaaaaaatgtagtcatttatcaggagttcctgtcctatttccccaaatagagggtaacccccttgaaggcaaaggcaggatcctgagcatgacaatgatcccctcggatcccaccgccgcgcagggaaggtgcccaccacacactcagggctttccatcacttcagtgttttcattctttaatagttaatgctctgttatttcacctaacaggacgatgtcttttctacgtgatctctcagctcctttcgtcagcacgtcactcacaattttctctcttcctcttaactctttttcaccaaccacgctgaagtttgagaaaacttattccagcaccatcttcatcttccccattatctatggagcacctgcgattggccaggcaccatgctacaagcagacagtatcaccacagggatccccacaaacctttatggccttcctctgatcacgctgtcagagccctggcagcggctctcagacagtccctcactgcagcctccccacagccctgcgaccgctcccacacatgagatcctcaccctcctgccggcaccaggctcagcacgcttcgtgaagtcactcgcttcaccctttataagataagtagagtttttccattttgcagatgaagaaactgaggcttggtgggggtcccggcaacttcctttcgctctcgttacagtgcagccgtcgtttagcccatgggctaaaagttccgcctgaatgcctaataactgttgaaactaaataatgcttaagtggggctaacggtgacaactcttcacctgagtatagttgacatttttcataataaaaatttaaaatcaaaagttgtttcttccagaaagaaaaaaaaaatgaccaaaacagtagcaggtctaactaactcactggcatattatgagcacctggcagatgttcaataaatagtcatttttaatctgtacttatgaatttatttaccttttagagacagaatcttgctttgtcacccaagctggaatgcagtggtgcaatcatagctcactgcaacctcagcctcctgggaccaagtgatcctcccgccttagcctcccgagtagctgggactacaggtatgagccaccacacccagataattttttatatttttgcagagatgggaatctcactatgttgcccaggctggtctcaaactcctgggctcaagccatcctcctgccttggcctcccaaagtgctgggattacaagcatgagctaccatgcctggcccacaataactaattattgaatgaaaaacaaatgaatgagaagcttaggcaatatgcctgaagcctcggctagtaagtggctgagccaggagcgaagcccaggttagtctcatggcaaagctcacgtgcatgtcatcacataggctacccggcctctttctaagggaggcggggtgagtcaacaccaggtgggtgtctggtaaagagaagactggttgagatttctgtggtctctggaaaagaaggcacctccccagaaatcttacctgtgtcttttcaatcaaaacttgctccagctctgagctgacttttgacagtaagatgcctccctattcaattttagtgcttagagatcaatactggagctgcagagttcacagaatgaaatcgaccaaatcatgatcaatattaatggcacagcatggacatcagcttactcagcggcttctctcttcgtctgtctcttctttctcttcctcccttgaagcttcaccaggaggcagaagcttccccgaggatggcagagaacactccagcaatgaggcagtgggcgttgcaggcccacagaaaagccagagcccaaccctgctcccaacaggatctgaatctactaggtctaaacccagggctcacatgaggccaaatgcctagctccgtgctaggcacagggcaggcaagcagtggtgttgactgcttcctgcccttcctgcctgctgggcctcacttcctgcagtacgactccacctctggaggctgctccttcacacctaagtattaaaagccctagctggctgggtgcgtggctcacacctgtaatcctagtgctttgggaggctaagacgggaggattgctggaggccaggagtttgagaccagcctgggcaacacagcaagacctcatctctacaaagaaatttcaaaaaaaccattggtcagagcagtggcatgcacctgtagtcccagctcctcaggaggctgaggtgggaggatcacttgagcccaggaggttgaggctgcagtaagccatgattgtatcactgcacaccagctgggtgacagagccagatcctgtctctattaattttttttaaggtctggctaagcacaagtgtgttaactggctcagctataacattcctctaccattggcccccagtcctgagcacaagcaagatcatattcataaccctcctcagaggctttctctgtattatcctgcatgttcagacatcaccatgcccattttataactgaggaaactgaggctttaggaagaaaagtagtatgttaagatcacacacggctagtagtagatggctgagcccaggatgcctacctaggagagaatattcaggtagagggaaggagagcaaagttaggggttctgggccttggagggaaaggaggaggtcacggcgatgccttgggaaggcatctggtggggagaaaggaggggtgagtactcaggggcccttagccatggagcagatgctgggtcataaagggcctggcccgccctaagacgtggcccctgcctgagagcttcaggggaacatgcgggccgaagcggggtgtgaaaactaggaggcccctgtgacatcttggtgccactgcttgcctctcctgcacttgcgagaggctctgctgatgacccgggcacctcctacgctgctcactgagaggagcacagcacagagtgcacacacatgggggacatacagaggaagaggctgggagaggccccaagtggccacggtttggcagaggggctctgcacccaaagacctccggccccctcactaaatatggctaccacttattgagcacctgctgtttactaggcacaatctcatttcatcccttaagcagcttctaagggaaacatcctttgcctggtcacagagccaaggagctgcagctcaccacggtccgatgatttatcgaggatgacgccactggtgggtgttggagtcaggaattcacccaggtctgtctgacctcaaggcaatcctctccccaacccgctgagtgccctggccatcaagtgcctgggtttgcccaaggcctggaagtcttccctgaggaaggtttgtctgagactctgccacgtttgacctagcttgaggacatgtcccccagagtttagcctgaacctcacaagctgtgatggggacaaatcatcctttccttctttgtccatatgtggtggctcctttaagcagactcaaaatacaaaaatccagacttagaaacaatgtttccctgtaaaacagtgagaaacggaaaatatttgcttacccaaaaggcatcttcattttgacagctatgagattcccccagtgcattcggaaataagactcaattgacaaaaattcatttgacattcaactttccaggaacacaactattgtcaatttataagagaagaaaaacagttctctttcctggctttcttcctgatactgacatgccaaagagagtcaaggtttgctgaaaaatgatttactctacaaaaatgtctggcaactttgcttacgatgtatcttcattgcagtgttgaaataaactttcagaatttctgcatcgcaaaggcaaaagaaggagggaaaaatagcaaacttaaaaatgctctgacaagatcaatgaaatatattttagatgtttctttcttctggggtcagaacacttaatgtttttcttcctacgggtaatttttcaacttgaaattttattgttgattttgctgtaggctgtcttgatgcactgctccttttaaaaatcaaatttattttaatttttacatcttaaagatggcaaaaagaccagactagaataaactggttcttttcctctctaaattcaatctcttggtccctacccccaccgccttataacagatacctatagaggctgggcattggtgagacacaagctcactttcccttgggattttacttattttattttattttttaaatttaatttaatttaatttttagaaacagggtctcgttctgtcacccaggctagagttcagtggtgcgatcatagctcactgcagcctcaaactcctgggcaccagcgatcctcccacctcagtctctcaaagcactcggattacaggcaggagccaccgcacttgaccccctgggttaatattttattggctaatgaagaactactccgctcaatttgggcttaatatacaacatgaccattttcctatgaaggactgaaatgcttctccttatcaggctaatatagtatttattcactaattaatctttgattagatacttggctatttattatggcttccaatcttgccaattagttaaatggctaaatcacaacttcctgcagcgggtcgctgctccagctgggctgtgccagggctctgggcactcccaggagagagagaacatctttcatataaaatatttcagctcgtttcagctcccatgaaacgaggaaatgggaaggagaggagagagagcactcagcttatgtaactgcttgctgtgactccgaatctagattaaaacctgactctgctggtatccatccagctcagcttggtccccaatcccatcaagccaatcaaggagccaaataattccagcggaaccctctatttcacctgattgtctggagacccagaaaggatgaacggcaagcacaagcatcatatctgagatgtgccttctgctttctaaagcaccttcacgtgctttctgtactgggccctcaccataatgcttcggtgagtggtggtgaaaagggagacaagggaggcagtgagggccttccagttactggctcttgttttagccagcagcattggccccagatgggagtatttgtaaaatgcagaatgcgctggtcgtggtggttcacacttgcaatcccagtgcttcaggaggccaacagaggagggtgacttcaggccaggagtttgagactggcctgggcaacatagtgagacccaaatctctacaagaaaaaaattgtttttttaaattagtcaggtgtggttgcgcacagctgtagtcctagctactcgggaggctgaggtgggaggattgcttgagcccgagttggaggctgcagtgagctataattgcatcactgcattccatcctggatgatagaatgcaaccctatctcaaaagaaaaaaaaaaaaaagaaaagcagaacgctggtccctattctagacctatgactcagaatctgcatttcccaagattcccaggtgattcatgtgcatataaacattgataagcattgctctagtatgcagagctcagagactatgtcttattcatctctgtattcccaactgcagtgtcagctaagtagctgccactcaagaaatgttagttgaccagatgattgacaggtagatagatagataggtacaggaacaattgaataaataaatgagatgcattgagagataggacacaaaaatgttatgtgaccaaagtcaccaggagatgaacagctagaattccggtgatctccagactcatccactttccatttttcatttgtcagtgaagaaagtgggctgcaaagcccataggagacctcccttttaaaaggtgcttgagagaagaaagatacgtaacaaagcaccacacagaggccatcgtcctccctccatccacattttggatcactgggtcatgtttagagaggatttttcacagagcaagtcaatcaaagaagccgctttctatatagaggaacccacagagccactgcgggctgtctgttgtgtctgtttttcaaccacattggaaatcaaatcattctgagaaaaaagtcaggagaaaggtcactgcctaccccagatagccggctctctgtttctataaaagtggacacgagaagatttggatgatctgaaggtggggactctgctgcgagtgtgctctgcaggctggagacatccttctcctttccccggcatcagcaaaaacaccgaatgcattaacccaagggggtaggacttcactcagaacctgcccttgccaagtggaaaatcctacagctcctggctccctaccatccagttctgtcacatccaattcatcatctagtgtaggccgggcctggagactgcagtccctgtggatttaaagccgtgacattctgaatctagagcttcaaaggggcatggtgagattgtccaccccgatcccctcagcacgggaaattctgatgtcaacaagccgggacaaagtttcctccaccagaagtccatggatgaaattctctttgggagaaatctggtttttgtgcctctaaagtggaagcccccaaccttgcttgaatctggacacgtttgagaaactgatgaaagaaatggctcctctctcttccagggaaaatgcacttgtgcacattttgctttcaatttcaagagaacttcttgagagctatttgtagagtccctaaggtccagaaattctaggttaataatccttgatagaaatgcaaactctaggcctttgctctggtcttctaaggaggactgcacctcaactaatgttaacaccaacaggagttgtcttaaattctctgcccgaatatgatttagaaattagagaggagaggctttatgcaggacagaaactgcctaggatattataattaggaaaacctggattcgaatcccagttcttcatttaacagctgtttctttaacaaagccacttgaactctctgagtctcagtttctcatctgaaaactgggaatgaaactacctcacagggttttcagataatgcatgaaaagtgactacaggttgagtaacactaatccaaaaatctgaaatcacaaaatactccaaaattaggaacattttgagtgccaacatgatgctcaaaaaacaatgttcattggagcatttcagattttggaacttggggttagcgatgttcagttggtaaatataaaatgcaaatattccaaaatccaaaaaaaaaattgaaatccaaaacatttctggtcccaagcattctgcataaggaacactcaaccttatcaaccacaacggtctttcgccttggtgcttaacagccctctttttttttttttttttttttttttgagacagggaatcaccctgttgcccaggctggagtgcagtggcaccatctcggttcactgcaacctccacatcctgggttcaggcttccctgcctcagtctcccaagtagctggtattacagatgcgcaccaccatgcccggctaaattttgtgttttcagtagagacagggtttcaccatgttggtcaggctggtctcaaactcctgacctcaaaatgattcgctggcctcagcctcctaaagtgctgggattacaggcatgagctaccactcctggcatcttttttttttttttctcccctttccattcatgagaactgaagaaattctctactctaaagtactttgaacccctctttgactcgtttcttggtgtgaaggcattttaatgggctctgtcaaaaatccatctagtggccgggcgcggtggctcatgcctataatcccagcactttgggaggccgaggcaggtggatcaaccgaggtcaggagttcaagaccagcctgggcaacatggtgaaaccccatctctactaaaattacaattacaaaattaggccaggtgcagtggctcacgcctgtaatcccagcactttgggaagccgaggcaggcgaatcacctgaggttgggagttcgagaccagcctgaccaacatggagaaagtccgtctctactaaaaatacaaaattagccaggcatggtggcacatgcctgtaatcccagctccttaggaggctgaggcaggagaatcacttgaacccgggaggctgaggttgccgtgagccaagatcacaccattgcactccagcctgggcaacaagagcaaaactccatctcagaaaaaaaaaaaacgttggccaggtatggtggcgcatgcctgtaatcccagctactagagaggctgaggcaggagaatcacttgaacccgcaaggtggaggttgcagtgagacaagatcatgccaccgaactccagcctgggcgacagagtgagactccatctcaaaaataaataaataaataaataaataaatatccaccaagggggccaggtatagtagctcatgcctgtaatcccagcactttgggaggccatagcaggaggatcacttcagcccaggagtttgaggccatcctggacaacatagcaagaccccccatctctacaaaatagtttttaaaaattatccaggttggtggcatgtacctgtaatcccagctactcaggaggctgcagctggaggctcacttgagcccgggaattggaggctgcagtgagctatgactgtgccactgcactccagcctgggtgacagcaagaccctgtctctaaaaagataaaacaggcttaggcaggagaatcgcttgcactcaggaggcagtggttggagtgagccaagattgcatcaccgcaatccagcctgggtgacggagtgactccatctcaaaaaaaaaaaaaaaaaagaagaagaaaagaaaattcacctaggccaagagggtgatgcccaaatcatctacccaagcactgctgagcaattctcgctacatgggaaacactgggggaggccctgtgggctgtaccccaagctgggtgtccactggagaaatgaacagaaacacagaagacagtgatgacctcgggtgcaaacagtcagtgccaagggaactgctcggacgtgagcacagccgcagggagcccacagagggcttggtggccaagagcctagctcaggcaccaggtagattaggcccggattccgctccttctatgggatcccctgtaaaatccaggacaagtttatcttagtctccttgtctagaaaaaacaaaacaaaaccaaaaccagcaacaataaaaccagcttcacagtttgttgtgtggattaaatgacatgcttatgtaaaacacctggtatcagggtgactggcagggagcttaataaatccaggctgttctcattacctgtgtttggaatggggctgaggagtggctccctagaggagggtggatgacaggctctgagaatggagggactcagctcaggaaggctgcaaggagggaggccagacccaggcgcagaggggcggcgcccagcctcccaggactattagttgctgaccccaccaggttcagcttggtgccgcaggagagcagggcctcaggaacaggacgctgaaaggggtcaagggaatcgggtcctggggatttcccgcccaaagagcgcaggccccccacggggtctctgagaccccatggtgcagcaggaaacctaggacaggagaggaacaggagcacggaaggagagaaagccccctgggcggcaggtgggaggacgatggggccaacggcacctacgggaaatttccctgggcttggccctccaacaaaagttgagtctcttaaatccatattgttttagttattttttgtttgtttgtgtttgtttgtttgtttgtttgtttgttttttgacactctcgctctgtcgcccaggctggaatgctgtgacatgatcttggctcactgcaacctccacttcccgggttcaagtgattctcttgcttcagcgtcttgagtagctgggatcacaggcacacacaaccacgcctgactaatttttgtatttttagtagagatggggttttgccatgttggccaggctggtctcggacgtcaggtgatctgcccacctcagcatcccaaagtgctgagattacaggcctttgtatctgggctgcgcccagccttagtggctacttttttgacagttacagactctgtgctcaataaacacttattgattgattgatttcttcctcggctatgttgccaggaatgaacctatttgtgcagcctgttaagcacggggttatgaactgcctgtcttcccccttctgagggactggagctttaaaagtccaagcaggggctccaggctggccgcagcaacaacaggtagcttgacagatgactctggccccaaccagctggaagaattgatgtgtctacagtccagattctctagaaaattgccagttctctgttgacctctgccaccaagggcttgatctcactaaagaaagggaaatggggaggtggccacagtcagagaaagcaactggagcaaggacatggcactcctaaaacctaccatcagcaaacgagacaaggcagactacagactgaatctgctcaaatatttatggcataaaagaggaaaccactggggtgggggctggagggggagcctgtgtgctagatggacatttaaaaattccgctaagtctccaaagcccagaggagctaggtcattaaaatctgcaggctaagaatagctcgagatttatcccccacgctggacagtcctgcttggcccagatgcggcctccaagcaagcagtgaggtttcaccttggctttggcagattccactgctgggattcacaggcaagagaaccccaaactacaaagagaagctcgatcagccttgcccacaatgcggagcagtcaaacagtcaaggccagatctaacatccttggtaaacacacaaccaggccaagttatgagcccctgtgaatgcactcatgagagatccaggtgctaagacgctgtaggctgtggtgggaaggccagctccagttgtgtgacctgagcgggctacttaacctctctgaacctcaggttcctcatctgaaaaatgggggaaggaaagaacctaactcatggggtgctgggaggatgaatacaggcaagtgtgcagagctgaatttgccttccaacaagaagcagtgttgctggcatcagcatctgtcccaaatatgggggaaagcaataagtgaaggactttacaagtcaataagaacatttcccaggaagtgaccctctgaggattgctgtgggggccaaatgaaaaacctcaaggggcctcagggcctgagcgcctcccctgctgtgcctggagcaccatccaggctgcactgctaccaacagaagcctgcaaagagctggccaaatgttccccagcagtttatgaacagaactgctgcttccagaaaactcctctgccattttaacaacctcggaaatgccttaaccctagaaaaactggcccaagtgatcaaaatgctagcaaggtgccctgaacctatggcctcacagaagaatcaacaggtgccaggccgtttgtgtgtggctgaggatgagggctgtctgggcgatgcgtgcttggaaaagacaggcctgtggataccagactttggtggaattaactccggacaaggagagcaacactaggcactgaataaagccctccatcaaattcaggggtcgctgatgagcatgtttccagcatgcaatgtttcacaatcttgggcacactcctggagagtagcatttcccatagtgtgttctgtggaaacgagttctaccatatgctccatgacgaaagggttcctcagtaaaaggtgtttgggaacactgcaggacagaacccccgatgaacatttgcactaataaaggcttcgaaagggcctgcgtgaaattaacgcacagcttgtttgagcgtggaactgtagtttggtttttggtagaaccccgtagaacacactttgggtccaccacttcagaactctgctactaaagcagcagccgtggcttgggagaccccactctgctgctgattcagtggtgagtgctcactcggtgcctgtgttcactcatctccagggctctgtgctctgggactgagcagaccctactgagtccatcagagatggccaggcccacgctaggcactgcggcagaaacgagcgcaggagcgaacccaagccctccgaggaaatacccatggacaggtatctgggaggacccaaggcataggcagtttctcagcctctccctctccccgcacccctgcgttccttgctgaatcttacaggagactcacattgaactttctgagcacgccttcttagaaaacacactcagccactttcatgtacagcagtgcccacctccgcacgcctcctcttgcacgctcctgccttaaagccaccattttcttcccttccccagaggtccctctctggatcagaagcagatatgccaaattttacaaatagcaccaggccctgctcagacggggtgaatctaggtgacttggaactggaacaaaatttcggggaaattggcaaaatgtatttaacctcttccctttccctctggcctcccaaggacctgattcccagggacattatttctgcttgaggcataacagagctagatacagatatacatgaactgcctagtccagggtgcagctctcagctctggcattgctagctgggaggctgaggacgagttatttaacctttctaagctttagtttccttatctacaaaatggtgtctaggaaagctatgcctcaaggctggagtgaggctgagctgaaatgcaggtgcattggaaggcagggagcacctcccagccctgaacagagagagcaaacggaggaaaccacatgctcccagcctgcgccccaggtggacctgctgattcatcttcccaggtcagactggagaagatagaggagcacctatttgatgggggaaaggacacactcaacatttttaaaagaatgaaaatattttatacccaatttttgcaagccaaaaggctggggaaatgtttgtttattttcaagtgaaaattccttaaaattaggaaaaggagcagaggaaggggttgagagaggaggctcagacaaaaaaaaaaaaaaaaaaagggaaaaactaaacaagttcaaaaggggaaaaaagaaaaaccactgcaggccaggtgcggtggctcacacctgtaatcccagcactttgagaggctgaggcaggaggatcacttgaggccaggagttcaggaccagcctgggcaacatggcaagacccctgtctctataaaaaattctttaaaaattggctgggtggtggcatgcaccaatagtcccaggtattcaggaggctgaggtaggaggattgcttgagcccaggagttccaggctgcagtgagccatgatcgcaccactgcactccagcctaggtgacagagaaagaccctgtctctaaaaataaaaaataaaaagtttgacataaagaatttttttgcagtggattaaaaagagtattatagccgggcgcggtggctcatgcctgtaatcccagcactttgggaggcggaggcaggcggatcacgaggtcaggagattgagaccatcctggctaacacggtgaaaccccatctctactaaaaatacaaaaaaattagctgggcgttgtggcgggcgcctgtagtcccagctactcgggaggctgaggcaggagaatggcgtgaacccaggaggcagagtttgcagtgagccgagatcgcaccactgcactctagcctgggcaatatagcaagactccatctcattaaaaaaaaagaaaaaaagtgtattataaggaaattcattttcattatagagaaattagaaggcacattcaacagagaaaaataaaaggaaaatcaccataatctcaccagctaaaggtaatttcaaaactgtgtgtaccttggctgttgtcttgctaggcatctttggcatgtaaatattttctggctaaaatgaagccatatgcttggtaacttactttctcacttattagtagtatacaataaactctagcattgttgctttgggttggttaaagcctaagctggttggtggataaaccttctgcacatcacccttgctggtgaggtattatgaatcccattttgcagagggagaaactgaggccgagaaagctgtctcactaatgtcatacaagttgaaagaggttctgtgctggggccgggaacagaggctcccctacctcccacaatagcgaatgtggtttctttcaggcagttgccacgcatccaggggcttaccatgctctaagggccagtttgtgggttcttattctatgaaacaggggcaatgaatgaggctgctgcacgttctgcgcttttgttaattcaagggtaccactggccgggcatggtggctcacacctgtaatcccagcactttgggaggccgaggcgggtggatcacgaggtcaggagatcgagatccagagcatcctggctagcacggtgaaaccccgtctctactaaaaatacaaaaaattagccaggcatggcggcaggtgcctgtagtcctagctactcaggaggctgaggcagaagaatggcatgaacctgggaggtggagcttgtagtgagccgagatcacgccactgcactccagcctgggtgacagagtgagactctgtctcaaaaaaaaaaaaaaaaaagggtaccatttcctccaagaggccacatcaaatggaaaattatttctcccattgggttatatgtgaaaactctataagaatgtttctttatttaaatgcctgggagactcttttgattggccggtgggatgtggacaatcccctgagcagaggcgagccagcctgtgagtgcacctcctgcccaccacgagagctgctggccgcgtgctgagtcctccccactctccctcatccctggctcctccttgcacatgagatcccctcaactgatagcgcagaatttactgactggtaaccaaactcggcttccttgtaaacaacagcaaaccacagctgcttctgccagttactgcatcataaataaaataaatggaagaattggagggaaattaagccctgcagagagatgagtgcttagagggtgaggcagacggggaaaggataattcagaccccttaccaacctaaccgtcgtcactcatggaaccacggctgagtgggtatgcggagcatccagaaccgaagaaactgatcgcccctccctcggctccctgaccaaagccatgtccacatgaagccaaacacctggatgtttagaaagcatatcttcataagcatttcacagcccaaacaactcagcttctcctctcaggggaggtctgtctcaggctcagagcactgaccaaccagatcacacatggcaagaggggaccagccacaaacacggcaaccccttccagaagccttgaggctccagaaggggatcacccccattcctaccagtcgcaaggtggtagggtctgcgagcatccagtgtgtggcgctgcacacaccctctgagctgaggcctccctggccacccaagggctccaagagcttggggtccatgagctcccactgactcacccatctcgcgaattgggattcatgagcacacggctgaggagggacttgaaacaagtgtttaaagctcatggtctccttgaagcagcacattttcaggaactgcatttgctgagccgggccttcctcccatttctgttcctagcaaggtgtccggctcccacaggagactcagcagctctcagatgaacacacagctcaatgaacatgtgggtgcccaccatgcctaacacaggactgaactcacagctggggctcagtagatactgtgtgggtgaggaaggaatggcttcctcacacccactctgtgctccgaggcctcccagatctgcatctccagcccagccctcctccaaattcacgggtcccactggctcagggcagatggccctgtggcacctgaagctgcacacgtgtgaattggagctgctaactccctcccctcctctgattctctcccctcctttccacacaatgcacatgccaccatgcactcagccagcctcaccaggacctgggagtcagcctagattcttccctctccctcctccccccagcagtcccaggtagggcctctggaaggttcagtccgcttcttcccatcctcctcccactgctttcctgattttcccccaggactcgcctcctaatcgcctccatcccctcatcaccactctctctctctcccctatccctgcaccagtcttcaaagccactatccacagtaatctcagaaaatctctccaaggtatgaatgtgacagtgccactccaatgcattccacactcaatgggtctgcagtgcccctgctaacccagagctccatgtccaactctcgcctctccaccatgacactggcctccgccagaccctagaggaactatgcacatacccttcagtggggacgtatggagcctgccctcccttctcttggggccaccagggagaacttgcttcctcttttctcttaggatatcatgccttcaccctttcccaaaggtaattttctttctttttttggagtgggtggtggttacagggacagggtcttactctgttacccatgctgaagtgcaatggcgtgatcacagctcattgcggccttgatcacctgggctcaagcgattctcctatctcgacttcccgggtagctgagaccacaggtgtacaccaccaaacctggctgattttattttttattttttgtagagacagggtcccactgtgttgcccaggctggtcttgaattcctggcctcaagtaatcctcctgccttggcctcccaaagtgctgagatgacaggcgtgagccactgtgcctggatgccttaaccatttttaagtgtacggttcagggacattaagtacattcacattgctgtgctaccattaccaccatccagccacagaactcttttcatcttgcaaagtgaaactctgtaccctttaaacactaacttcccattgctttctcccactggaaatcactgttctactttctgtctctgtgcatttcactactctaggaatcgtacagagtttgtccttttgtgactggcttatttcactcagcacatcgtcctcaaggttcacccatgtggcaggtgtagcagtgtccttcctgctatttaaggctgaataacactccatggtatgtatacgctgcattttctttatccactcacccatcaatggacacttggattgcttccaccttttggctgttgttaataagtctgcagcgaacatgggtgtacaaatatctgtttgggtccctgctttcaattcctttggatatatacccagaaatggaattgctggatcatatggtgattctatttttaattttttgaggaacctccctacagtgttccatctaccctagtataaattttacatccatctgaccagttggttcttagtgtggggaggtacagaccccaacgctgggagaagcagcgaaggtgcaagttgctaggactccagtaggaggccctagaaagagtcctctcaggacaagaccccaagaaggatgagtgtcagtccagcaccccaatctctgatgatgccgcttttcctctcgtcttgtgatgggcttgtttcagagtggaaggggtgaaactgagaggcggatgcaaagttctgcaaaaggaggcaacatcagctctcaaacaagacactcatgagccaaagatgctcatgccctgcttctcacagtgcctggttaataccaaaataatacaaatctcctaaaatgcacaaaatctcttaaaatgcctaagaaatgaagcttctgcacagaagggtcctggacctgataacagccccaagtgatgtccactccagccacagcaaatgactcccagagctcaagagtcaagccctgttccctgcaggccttttcccatgccattccctctgcccaccacatccttccacccggcagcacccatgccacacacacaccatcaggctaggtgataccctcctttttgcttgagcagatcacacatctccatcaagtcatggcttgggtttcttccccatcacccctctaagctgtcagctgtctcccccactgaaatgacagtgttcctcatctctgtatccccaatacctagcacagcacaaggcacacagtcaaagctctgcaaatatttttgcacagttaaataatatttctaaagcaggtgtttgtttgtttgttttgagacagattctctctctgtcgtccaggctggagtacagcggtgcaatctcagctcactgcaacctccacctcccaggttcaagcgattctcgtgcctcagcctcccaagtagctgggattacaggcgcctgccaccaacccagctaatttttgtatttttagtaaaggctgggtttcaccatgttggccaagctggtcttggactcctgacttcaggtgatccaccagccttggcctcccgaagtgctggaattacaggcatgagccattgtacccagcctgaagcaggttttaatgataaaagcatgataacagtattaagacagggtttctcaacctcagcactattggggccatttggggccacataattccttgctgtagggggccatcctgcaaattgaagggtgttcggtatctctggcctctacctactaggtgctggttgcacccttcctcccaattatgataccttacatgtttctagagtttgccaaatgtcccctggggcggtggggaagggcaaaaccattcccagttcagaaccactgcaccaagatgatgagcaattattcaggcgtggtttgtcctctcagagaccttttaaaagtccaaggcctaaatgcagcttccagacaatgtacgaaatctcatcagaaatgttcacggcatttattctcattttgtaaatgatttataactttatatatcttgtgaataattaagaaatgtgcccgggaacctcttccagcagatcttctggtaggaatcttaaatcatgtgccataagctatcgaccctggtctgatacattatttacaaagctcactaaagcctgggatgaggaatcactgcatcaaaactattcccttcaaaatcttttttaaaagagcttagaaattttcagaggggcgtgcagagagcaaagttcctggaacaaattttataacagacactcgaactttcggatgggagacactgcacccaaggcctatttaacaaaagcaaagggaatgaaaaagatgaggctcagacggggagaaggaatgcgaacacccagggttccagcacccagctaaagcatgtcctgatcataaaggggaatatttacgtaaaaccatttcctattcgttggcaagattaaatgggatgaggaaagcaaagcacagccctgattctgatgagaaactcaataaacaatggtcttcttctctaggtgactctttctgggctaagaaaggaggaaaagatcaaaatccagagtgggaggtgtcagaagacgaattgtccctaatccctaaaactgcgtggttggacccgatggtcccttcctttccatctctgatgttctgactcaggactggcaggagcccgttgccctcctcagggtctcaggcagggaagagagtgctccttgaacttcactggacagaagaatcatcagggatcttgcttaaaaatgcagatttgaggaccccatcctctgagatcttaattcagtcattctgaggcacaacccagaggctgcattttaaaagatgggacctgaaaattagcctggcgtggtggctctcgcctgttgtcccaggtacttgggaggctgaggcaggaggacagcttgagcctgggaggcagaggctgcagtgagccatgatcgtaccactgcattccagcctgggtgacagagcgagaccatctaaaatttaaaaaaaagaaaggaaaacctgggccttgaacactgaccagggaagaccaggaccaggactgtgctgaaaaatgctgccttgtaggaaaagcacactgtgagaactcacaaaggcctgtgcctgccgaggcctgggggtgcttctggacatccgcatgctccataggccacgtcagctgacaccagactgcaatttgctgacccaggttataggaaaagctgatgttcagtcaaaatggtaactggggcttgcttatattttcaatattgttacacatccaaaagctcaattattttgcaataatgttggactctgagtgcaataagtctcaaactttagtgcacagatgacttactaagaagatcccaagaagaaaggatctaagatacagattcttgagtcctacccctggagaatccaattcagcaggctgagagggcaggctctgacattttaaccagtgccctagaggcctaaaaccattttagggattcaggcggttcaaggacccctctgcaagtaacaccaccaacagccctaccaacagagggccccacctctgtgccccgaatgaaatgaaatgaggaggaggctgagagatccagcagagaacgccagtctttaccaaatgcccgagattatgcatgtgaaggtgaggaggataagcatgaccagcctaagtttttgcttaaaaaaaaaaagaggtttcaatgggcacagtctttttatgcaagtccaccctcagtcccttctgaaaacaaggccgagtcaccttctccatcattcactcgtgttcattcattcagacgacatgctctgagctctactcatgactcacaccccaagcaaggttccagggacatgagcgtccctccatcctaaagcactccctgagcctcagcccctgtgactggggatgtttcaccccacaatatcaaggggactctctaagctctagccccatggatcacggaaggagctgtatgagaaatgtgaggttactgggcaaagctgccagaggtctgagaacgtgtggccggcgtgagggaacatttgctggatgatgggccaagggaggccaacaaaataaatgttagcccactcaaagctgagctggaagaggctggcagaaagggtgggcccggcacacacgttagccgagtccctggctttagctgaccaaggttttgtccttgttggaggcactctggccatggcacctgggctccgcttggcacaggagcatgtggacacgtggtgctgctgggggtcatgggtcggagcctctgcttggcgaacactccttctggaatcaaggatgagctgctccccacccctcctggctctcgaatgggcacggggactgtctgcccacctcccatcctgttctctcaacaacctcaactcatgctccagcaagccctttcctcagggctggccctctctgcagcctccgggtcccatggagcatgtctatctgcccctcacgggccacacctttgactctaagaggcctctgctactatgacccacaccccaggagcttctggagggaacactgcacaggtccagggtgccttcccatcgcccctgcattgttctctgacgcatttatgaggctgcatcttctctctcccactgactggaagctgctgaagggtggggctaccaatgggcctcctaacctccgcagaatcgaggcagctgctggagctatagtagatgctgtttatttatgttttagagacagggtcgctgtgtcacccaggctggagggcagcagcatgatcacagctcactgcagcgtcaaactcctgggttcaagccatcctcccatctcagccttccaaagtgccaggattgcagatgtgagccaccacgtccggcctatggtgtctttataaaaaggggaaatgcagacacagaggcagatgcagggagagcaccatacgaagaagatcggggggcgatgtttccaccagccaagaagtgcaaaagattgcccacagaccaccaggagccaggagaggggcctggacatgtgctctcccacagtccaccaaaggagccgaccctgctgacaccttgttcttgggcttccagcctccatgagagggagacaataaatgtctgctggtcaaggcacccagtctgtgggactttgttatgccagccctagcaagctaagacgccatgcatctcagctctgatagaaaacctgcgtgtgaaatacttgaaattccacagcagtggtagctgctgcagagcagagggcaagggcttgcttgctctgaacccacccagcacaagcagacctgaaagcccctcccagggatcttggctggaatggagcccccgggatgggggaagggagggtccgggccaggcacccacactccagatgacaaggccgcagcagccctggatgagtttattatttattagctgctgtcctcactttgctcagtctaacccacttcagagagtgtttaatatttcagaaacagacgagccagcattgcccaagctgattcgtggtcttagtcacacaaaacgcttcctccaaaagggtgctgcaagatgacttctcatcttgtgcagaggagaggagccgaccccctgtaggcctcagctcccaagtggagcttaactacagccgaagagcagcgtccccacaggtaaggggactgagtcccagtgagcgtacacagcaccctctgtccagccgcccaccccagggctggatgtgctccacttcctgccgggccctaaggcgaggcctctgtgcagctatcccattaaatcccccagtgctgctctttcctcacttcagagtccaaagagtgccaggagccacagaagcagtgcagtggaagccggggttcgaatctagccccaattccagacccccagcttctccttactaactaagccacatttctggaaggtcatgcccagtgaaggtggcagtgagggcagaagccccatgtcagaggccttggagccgtggggagcgcgtccagccgcagatgcattgccagcttccctaggatgtgccccaatcggtgagtagggggtgctcaccttacaattctcagcctggattacaccttaaggtttaaaacaagctaagaggagataccttcagaaagactcagtaacaccttggaaagacagaggcctgcccaggtctctccctggagtgacctgtaggaggtctgctggggacccttccaaccacacccaaagcctcagagcacagccgccctcgcgagccaccccacatctggcttcccactggggagtctgtagggtccaggtctctgttgacaaaggcagagattttgaggcagaacaatggctaacataatttataaaaacacaatattaaatcctcaatcctcttcaacggaaaagaagtctctcctgtgggcacgctgcagaggggaaggctgaagccagccatgctgaacgagccgttctcgtctcctgctcattccacctgagctctctccccattaccgtttattttctttgcaaaaaagaaaaaagtcactattctatttaaaagatttgatggatttagtctataaagaaactacataaagtgactacattttcttcccgattgcctcgaaccttcatgcgatgtcattatctctgtgttttggggacctccccataagaatggttttgaagtcatatttggtccatcacatcctgacagtgccgctttctcttagggatgtctccttcccaggcctcactttcctcacttgcacactgaagatggtgatgttagcattggtgaatgagttccaacaggcacatcccattcacaatctcatttaatcctcacaataagcctccaagtcaccctattattaatcttatccccattttgcagacaagaaactgagactgaaaagggttaaccaggctgtggttacaagtggtggagccaggagttgcaaccaagctaggctagtccaaatcctcactggaatcacgatgcctccataaggataaaattaaacagcacagaccagagccaagccctctgtaagctggcacgtgtcaggctaaggctcactggtattttcaggggtcagcaggggctcctgccatattgcacagctgtggagtggagcctgggccttgccggcttcacagcactggacctcagagaccttggatgctgcagccccagcttcgctaccctgagcaccttgtgcctttgttggggaaacctggtcaccagcatgactgccttatacgttgaaccaaggctggcaaacctgtggccttggctggacaagttactccaggagccaaacagacccagccaagctcaaaccaacaccctccccctacacacacaaacgcacatgcacacacaatgcacacatgcaggcacacacaagcatgcacacaggtacacacacaagcacacatgcacacacagacacaaacacacgggctcctaagtactaagagacctgcggacacacaacagggaaggctggggccttgaaaggcaacagttcagatgtttggatgtcccgcaggtaggtagggagtagggcagccgcacttagggatggaccaggtatggtgcctgcaccctgaactgtctcagggacacccttgttggactgcagctacaacaaaaatagagcctcctatagccgccttcagagcaaggcccacagccactaatctgaaaggcctcgatttcagatcttatatttttttctcatatccatcataattgaattttgaaaagttgcactgggcccaggaaaaaggcagtgagttgggagtgagaaccatttagcaaagcactcttttcttaaagtcttggctgcactttcgggtcgcctgcccgcagcccccaacctcctccaccccatccccgccccgcaggccctgcaatgacaggtaagcatccacttctttcagagtgtgtcggagagcagggcatggggtggagatgagttcattccatcttgctgtcttcctccagacaaggtgtgctaacaaggaggtgaccggagtccttgtggccctagctgatctgtcactaggaaagccctagtctgcctctgtcacagcagcccagctcttcagcactggctaagaaaaaacatgacaactgagaattgtgctttctgggttctggcctccttgtctcccactgcttctccttcatggtcattctttgactctcagtgagttcctgcttttgatcttcccattccaaagttggaaaaatacccaaggtcatttccaccatcacgactgaccctccactgagcaactcctcctggcacttgcaatataaccccacggtctgactatggaacaaaatgtgctgtccccgctgcagcaccctcaggagagactgggtggcagtctgtggtggtccagagaggacgggcccagcaggaccacctgtctcggtccatatatggggctgggatgggagaggggagggagcagagctgagctggaaagggtacgggatgaccgggttcccctcttcctgccctttctcttcctgaactccaagccctcctgtcctgttcctccaagtcctggtcacccagatgcgggggctcctgcacctcttgtcccccacaggagaccctaaagactctgcagcttcttggcaccgggagccagcagcaccaggtcccagtttagaggctggcagcagcaggcatgttgaagaactggaggcaggaggaggcaggggatcagtgcaaagaatgggtcagcatggatggaggcgggtatacccaacactgggcctccacaagttcttgagaaagtcaccaccggcctgccaagaggagctacaagggactctcccaggtgatacctgatggaacctgggcttgaccctagatccatccaactccaaactactggctcttcccagtgggcagcccaactccaataccaaggctcggcagacaggcacatctgtgcagtattaagtggctgcttcccatggccattcgtttctcctcctgtgccagggatgcgtgagtgatgatggaatgaatctgggttagccggtccctcttcccaagcagctgggaagcctccttgctgctcgtagaagaacacgctttgcagggggaggacaaactcccacttaacaccactgcactgtgggcgccatttttccccggacagccacatcttgcttttttcctcttggcagtgttttgtagatgatctagtgttacacggcgcagggactgggaagcagccggcacgagaaaggaacctgagcacacccactttgccttcatttctccggctgcatccgaggctccccagaggggccggcgcgcgcccgggcgcacactcgcacacctgcccgcgcgcacacacccgcgcctggccccgcgcgcgcacgtcccgcgacctcgcaggttcgcggcccgcaaccggcagggcaggagcttccaccaatcccctcgcctcacgcctcctgcccaaatatagaaaccgacttccttgtcctagagctcggagcggcggccgccctccctcgctgggctcccgaggcggcgctccccaggcgggcgcggggacggccctgtctggcctcaccagcacgtggggcgctgcctgcgctccagccgcggcaccctggcaccctggcaccctggcaccgaccgcccggtcgtctctctcccggtcgcgcagcccctcggccagcgggccttgtccccacccaggttctctggccgcgactcagcagcggcgcctcgccccggaacaggccccacccggagaggggctgacactgatcgtgccccctgggggctggggcgcattcaaggtaaccttgaaacctcacaggcacatggagaggtcaaggaggaactgatgacctgtcttacagataagaaagccgaggctaagtgagtagtcccaggttcgcacagccagtatgtgatacctagccgaccccagccaggcttgtccaagtcggaaacgtacgcgctgtccttcacacctctaaagggctctggtttccagcctgaaggctggaaaatgcacaaggaagggaatgcctaaaatcccctgacccgatcctaatcgcacgtgtcatgtttattaagacagggagatgaagatgaaaggtttgttggggaatggtaacccctcatctggctgcaccacttttaactttttggagcagttctgcagacattatctcatgtattcttaccatgtgtgaggggatcagatggatttggtagaatttgttcgttttaataaaggccatttgatcaatgtaaagccaaaagggatttcatggaaaaactcatattttcaaatttgctactcaggataacttctgtgaccatcttcaaaataaataaataaataaataagactttatgggctgagcacagtggctcacatctgtaatcccagtgctttgggaggccgaggcgggaggattgcttgaggctggcagttcaagaccagactgggccacatagtgagacccagtcattagaaaaaataataattaaaaatatgtgttatggaacttccacactgtcatagaagggacctgggaaagaaatcaccatcccacagcgcaggtgaaaagggtgggacccgctggagaagcacacatcctggtccagaccatggcctcctaactaccagtcttatgctccaggctggggaaaggagcaggctcatggtggccagcaggctgctgatggtgggagatgtgtgttggagatgcagacaacagccctcctttccagctgagaccctgggcgagttgctgaattcctccagggtctccactacaccatctaggaagtgacactcacagtgccccagctgcaagactgtggtgccgatccattattttgatggatatacacttatggagaaccaactgtgtgccaagcactcctccagattttggaaatccagtttaggagacagaaaaagccactgctctcacagaatttattttttagtggaggaagagagagacagacaataaaacagaaataaataggaccatttcagatagtgaagaaaatgaaacaaaatgatgcgatagagcaggtgggtgggagccaggcgggggcgaagtggtcgctggagagcagtcgtctgggcagtcctctctgaggaagcgacatctgagctaaggacaacaaaaaggagtagactagcttcgttcatggctgcagagaagacagggacagcttgaagcacaaaggcctgaagacagaagccaggtagacgtgcctgaggaacagagctaaggcgagtagggctgtggccgtgtgagggaggacagggacaggaggttgggacctgggcaggaacgctgggcacacagcctagcgcccagcagaaggtcagtgactaggctattgcaattcctggaaaacagtcaactgaaagcatgtgcatgaacattctggaaggcggcagagtccacagcggtaccagacacccactcttctcaaacccattatgcgacttaccaaacaatcccaaatgtcattggcaacaataaccaaaactaatagagaattgagtctgcaccaattctggagagttggggtggctcttcctagctaccctaccgggaagacagtacccgaaggtttactctgcatccagcctggtgcccccaccctgggcaggggacgatcacacccctacatcttcaagctcacctctgatatatggatcatcccctgcctgcacagggactaagtccagaggcaaaggtggaaggaacaggagtagccggctgacctggcctcaccagaaaccacatggaaattacaccttcagacaggttcagggggagctgtttataaaaagaagctcctctggacatcccagaagccatggtcaagatcaaatcgcactcaaggttaattggatagaaaaatacaagtgctagcccatgaaaacgattttacagccaggactggctatttaatttgcatggcccaggacaaaatgaaaatgtggaacccctcgttaaaaagtaatgagtaattttaacacagaacagagcattgaaacatgcacaggacccttttaagggcaggacctcatgcaactggacaggttgtccaccgataaagccagccttgcctacatgtcaaaaaaataaaagaggggccaggcgtggtggttcatgcctataatctcagcactttgggaggccgaggcaggcggatcacttgaggtcaggagtttgagaccagcctggccaacatggtgaaaccccatctttactaaaaacacaaaaattagccaggcatggtggtagacgcctgtaatcccagctactcagggaggctgaggcaggagaatcgcttgaacctgggaggtggaagttgcagtgagccgagattgcgccactgcactccagcctgggtgacacagtgagactcagcctcaaaaataaaaaataaaaattgaaaaattaaaaaaaatgcaggacaatgtgtttaaaatatagcccagtggaagagaagccatagagaaatcagacatgtgttcctgtcccagctctgcctctagagagccgtgacctggggaatgtaagttaatcagtggggaccccagcttcccagtccagaaaatcagggatcacctcctcgggggttgctgccctcctgcgtttgttgtgagagatcgaatgagataatgaaggtggcatctaggtcaggaggcattacaccaatataagggattactattattcaccaagacctgccagagcacctggatttctcgagaacattgacattccccagcaattaagtcaaattaacataattcaaacaaaacatctaattttagctatgtgtaacgattccctctcaacagaacagacactgctgcctctcattcaaggagtgcaatgccagagagatgtaggaaggagaccaaacaattctgccacaggccttttacccaggcacgcaccagattgttcctatttccacaactgaaagaggtgccgctggacagattctctttcatccagccgtcctgctggcctggttcattggagcttcccccggcgagtgagaaggaccaacaaccagcgcagcccgctcagaccttggtcaaagcaacactcccctggagtgggaatcagaagccccagggctcctctcacagaccagtcctatggcctcagttctcctgtccataagagagggggaataatgcctcttctgcctccctctctcaaaagattgtttaaggtgttaataatgattattccatgtgtctgcatttagtgcaaattaccagattcattcattcaaccaacgagtcgtgggaatgcaaagggaaccaaggtgctgcctctgtgcagtccagcaagaacaacaagcatttaacccagggggtggcaaactgtactcaagggccaggtctagcccgctgcccattttttgcatagcacgggagctgagaatgatttttacatttttaagtggttaggagaaagaagaaaaacattttgtaatgcatgaaaattaaatgaaattcaaatttcagtgtccataaataaagttttattggaatatggccatgctcgtttgtttgtgtattgcctgtggttgctttcacgctccgccggcggagctgagtatttgcaacagagactgaaatatttactgccaggtcctgcacagtaaaagtttgccaatctctgaagcaaagccatgagtgagattatcagtgttaatggaacacggaagagggaacaattatttctgtttaataaagttggggaaggcattccaggagtgatttttttcttctggactttaatgctcagctgtgaaccccgggaaagcagctgccctcaccccaggtctcagtttcctcatttgcaggatgagtaggttgtctttgaactaagggcctgtcccaccgatatgtcctgcaatactgcatgtgcccccagggccagttctttgcaggggggctggtgtgggcatccaccaaaccccgcaaacacctgagctgcgcgaggcacacaaagagcactaattagggcactgggacgaggagcagtttggaataatctatccaggacacatttccttgcaccaggtcccagagaaggctcaggcttctgcatccaaactcaagctccctggcaggcttctcccccggcagaggcgcctggtgggtcctgaataatttagcactctgcaccagcagtgcagatggccacctcccattatcgcaggctctgcactttgctgccttacttggtagggccaagggccatttccaagtggaacaaaagaacagcatccctcttgtcttctcagagttcctctcagcatattgtgctccaagagccattgctcataagggctgggatttcttgccagagtacagagagttgggcctggagatctggttctagtgcttgcttggccactaaaaatagctctgtgatctggacaagccatttcctttctccagatggcagtttcctcatgaaggggatggggtgtgagattcacaaggtcccttccaagaggctgtgtcttctagtctagtccagactagaagctggactagaagctctttgttctacatgtgagaaaacagaggcccagagacacacagttatttccccaaggtcactcagccacttccgagaggcagagtcaagaccagcagctttagttcctaatgttcccattctaaggcactgcccataccctggtgtgtggtatgtacagatctatgtctatgtctatatctatatctatgtctatgtgtgtctttgtctgtatctgtatctatgggattggttctgtttcgggaatacatgccttctgtactcagggggtttggatgctagtacaaggtggggatgctattttatcttactgtcaagggaactggtatataacattcccatcaagctctaggctctgtgttacatgctttcaaaacattctttctgtttagccttctgcctctcacttttttcctcttaggtacttatttcattttatttaatcctcacaatcaccctggaagcagtaagccaaggatgttaaaatcaggcggctgggacaaaccccagctctggctctcattagacatgtgacgtgagcaagggacttcaccttcctgagcctcccaaggtcctcacctgtaaaacaccgttcccacgcacctgcctggcttgtgagggccgagtgggcttgagtggggagcatagccaacacagatggtccttgccttccctgtctcctttcatggagagaagatcagccacaggtcacggggcctggctcttttcctgctagtagctgggtgggcagttgatagacgagaaaatgacatgaatttcaaaccacaaaccctacatctgtcaccgcctgcttgttataaatcgggactttggagagggactgttgaaggcttccccccgcctctgccactgcgcagtggtgtgaaatgcacttaatcttcctgagccttagttttctcccatgtgaaatgggaaacatgatacctgcttctccacagggttgctgggaagatcaatgacataatgccctgggaagcgcctggtgagccactgagctccatgtaacaccacgggacaccatccacacggtgcaggccccacgccctggggctcctggaagcctgagtttccagggttcatcgccccgtacatgcagccacagtagagggttccagctcaacagcagcccaaacctgaccatcaccttcctgggggagttccctctctcctctccccagccccagctgagcagccactagagaaaaatgcaaaaggtgttcagcacctggagcttccatgacaaccagtgaggaatgcatcccagggtgttggagatgggcactgggagggactgaaattgaaaaggaactccagccagggtgaaccgggagactgatctctcctgagaatcccgagtccttggaaactcagaaacggaagaaactggaacttaccaaaaatatcaaattcaccactacaagccaagcctccaaaaagcaggcctgtctgaccctggtttcatgcaccccacagaacatcgccagtgctctgggctgtgggattgccttagttgctttccaggaaaacaggcagccagggctgcttagccccctctccctctggagtcagggcctccacgctcctacaagctccacagaggaagatggctgtgcccgtgaccttgaaagcaacttggcgctgtgtgacagagccagtcaccttacattgaaaacagacaccattctgccccctgcattccctgttcacctgaggcaggtgctctccgccctccccaaagtcactcttttggccaacagaaagggcacctcctccctggcctcagccagaggtttatagagtcacagggttgcctgattacacaggctcagcgagagacagagtcttcaaaaacacatatccaaagggccagctctgttaacaaagagcacagcccacactcccacagcgtgtgtggccccgggcacttcatcagcatagattcctccccatatcaacccacaacatggtcagcatgggggcaatgagatgccaggtggaatggggtactaatgaggtggatggccttttgcatgtccgttcacactcatatgccttgcagtctggtgccaccactcatccagatttcccttcaagctaccttaggcccatgtaagccagttggcatctggaaccattctgccctgtggccttgtaaacccacataatcagagcataacaggtaccgagaaggatctcatgtttgtttgtttgtttgtttgtttgtttgtttgttttgagacagagtctcattctgttgcccaggctaaagttcatggcacaatcatagttcactgcagcctcaacctcctgggttcaagtgatcctcccacctcaacctcctaagtagctgggaatacaggcacgcaccaccacacctggctaatttttaaattttttgtagagatggggtcttcctgtgtggcccaggctggtcttgaactcctgggctgaagggatcttcccacctcagccacccaaagagctgggattacaggcatgagctacagcacctggcttcccagaagggtcttaagagtcctctaaactaaatacagaggctcagaagcaggagagcctctgtgtccaaagctacacaggacagtcaagaggactggaactaagcacagctctgttgtcgagggcaggttctcttcatccacagcagcacagttaatgttcataaatcagagggagtggcactggaggggcagaggctccaacaactcagattgttctccggcccagggaactgggagatgccagggaatgcattggttccatttcctcacggagttgctctaggacttcactaaaggtgccactacggctgagcgcagtggctcacaccttaatcccagcactttgggaggccgaggcagacagatttcttgagaccaggagtttaagaccagcctgggtaatatggtgaaaccctgtctccacaaaaataaaacatgagccgggcatggtggcatgtgcctgtaatcccagctacttgggaggatgaggcaggagaatcacttgaacctgggaggcagaggtttcagtgagccaagaacacgccattgcactccagcctgggcaacagagtgagaatctgtctcaaataaataaatgaataaataataaaggcaccactgcattaaagggtctgggaaactgcctcagctaacatacagtggcagagtgggaagggatctggtcaccactgcatccagcgtccctcaggacaggcacttcttccatagtatctcagacccagactcaggaaagcttcctggaggaggtgaagcttaaaggatgagtagaggccgagcaccgcggctcgcatctgtaatcccagagctttcagagtccgaggcaggaggatcacttgagcccaggagttggagaccagcctgggcaacatagtgagactctgtctctacaagaaataaaaaaatacccagtttggtggtgcgtgtctgtagtcctagctactcagaggctgtgttgggaggatcgtttgagcccaggagttcaaggctgcaataaactgtgattatgccactgcactccagcctgggagacagggtgagaccttgtctcaaaataaataaacaaacaaacaagggatgagggggaatcagactgagttccggagagggagcaccctgcgcaaggtgtgggtcaagggagcccagcaaatcctaggagcacggggaggcttggggaggggtgaggcacagtggtcggggaagggtctgacttcatcctcaaggcaggggaaagcaacggaagggttttcggaagggaagtgacaactatcacatttgtgtttgaaaaaaaaaaaggggctctcgctgcaagataaagaccgtattggaagggcaagactagaggaagcagggatgcaatggagactccagcagcagtgaggatggtgagttcactggagttagccttaaaagttcttcctgagaaatctggtgatggtgctcggtacagaatcataaagtttttccgtctgtgtcttgtaagtcctgtgtggggcagtattgacatctgggttaaaagtgctaacattcaaccacaccagctgtagtccaggtgtccttcaaatgcagatctgttcaagaatgaagtgatacatgtgactggcaagaagacaatatttttttgaaaagacaaatggtttgactatggtttgctttgcctaaagcagataccatagttaagtgcaacagctcaagaacttggtaaaacaccacgatttccagacattgctccatgtcggcggacaggccctgggtcccttgcattgtgtgctatcccaaatcagaggagactactggctggatccatcacacacctgtcccttcccaaggcttcacaggctaaacaagctgtggaagggccttccctgcccactggcactgtgtaacctcagatcagcagggaaacagtctcctctccagagtgtggtcaatggtagcaaccaaagcagctcttgcaaatggcattacaatgaactggccaaatctctatgccgcaggagaatctagtgtctccataaattcagtgcaactctatggatgtttcagactttgaagtttgcctgacttgggctgtttctgattcttcactctgagtttcagatcaggttcacatttctccaaattctttactaactcatttaagaaactggcagcaatactagctgagtactaccaaccttggcatttgacctgatggccatctccagaaaggctaacactgcatttaaattaataaatacaaggtgagaatttagccaggtgggacaggacgttcatcttttaagtctcattcgggattaaagaggaaaactccaaggcccacattttttaagtcttcatctatttacccattcagggctcaggtgcagacatgtgtttctctctgccacccacccctaggtccacagcctgctaatgctcatgtcttggattttatgggcagccccaaggtggatatgggtgggagctgaggcattgtcctgccatttaccaagtgcttatatgccaggtactttccatatattaagtccttcaatcctcccaacagccctgcatggctgtggggtgggtattattctctccaccttacaattgacaaaattgagactcagggagcactattgagcaacttgctcaaagccagccagtaaacatctgactccatctcactccacaggccacagctcttcattactgcttcctgacgcatgctaaagctctgctgatgctctggcccccttgcccaagggtacactggaatagtatgggacaggggagcccaacctcatctaggacactggaggcaatgtttcaactgcgttctgacggaggacttgacattgatgttggaggccaaggatgtggcacacaggaagatctaaaagcaagtgaaggcacacatttccaagtatcagtgtacagcccagtgcaggatgcaggaaagacagcaataagacaggagaggcagctagggagtagattcagggggtggaagggaggaagcctggttaaccagcctggacttcattctaagggcaattaggaagccactgaaggactgaaagaagggagtgtcaggatctgatttgcatttttggaagatccccctggctgcagaagggagtattaggcccaacacacatacattttcaagttggtttacaatggaagtcttcatatgccaagacccaactgcctgggctcttgggggccacgcttcagctccactttgagccagtacattccgttacctacttggctctagtccacagcaccttggaatcccttactgagggtgtggcatcagctatacattccagatttcatctccagaagacacacagtcagagaaagccctgctaccctcttagacaggtggggcgtcctctgctttttctttctgtgtctcgacaacttgtttatttttaacatttttttcctttcttcttttctttcctttcctttttttttttttttttttttttagagacagagtctcattctgtcacccaagctggagtgctgtggtaccatcatagctcactgcagtcttgaactcccctgggctcaagtgaatctcctgccacagcctcctgagtaggtgggactacaggcatgccaccacacctggctaattttcttaaattttcttagtttttgtagagacagggtcttgctgtgttgcccaggctggtcttgagctcctagcctcaagcaattctcctgcctcggcctcccaaaatgctgggattacaggcgtgagccactgtgcccagcttattttgaacaattattaaaaatacagaaaaggataaaaaagaaaattcaatcacccggaaacacacatgacaaagatgaccactgctcacatagtgtgtatttctctgatgacatgttacttggctactctggccctgagtcttcctggtctattccacgtatattatatatacaagtgtatattgtgtcaatttaaagtgaacataacacaacaactgaagcatattcctattttcaattaaaagaatattcttaaaaacattttaagcatgtttttggtgaatgtaaaatacgtcaccacatgggtgatggcaccaaagtcctgtctttaagagtggatgggtcctgctccctgagcccacctccagccagtggggctggcttctgggtgggaccatcagcatccttagctgtcctaacaccctgtcagcttggtcatgtgtgtgtcgtacttaaagccaatgcttagaagctttgtgttccagggcctagctggagggcacagacttgagctgactgccagctcctcccactgcaagccccgcagctgcccctgctatcgaagatgttttctatgagctctctccctctatcaggtgagagccccaggaagccacctatgccacatgccaagaaggactcaccatcttcctcctaacccgtccccctcctctttcccaagctcagtggaagtcatcaactaactgcccaaatgccaaatcaagaaggggcccctgttggcatctgatcataggtacacacgtatacacacgcttacatatgtacatttgtatgcaaatgtgataccgcacattggaaactactcagaccacccgacttcttaggggcaggcgacagaaccatggggatgcaagagccaggagagagctgcggagcaagagccagccaggctcatccattcacaccaccctcatcgtatcatctccgtgtccggctcctggcaggcgcttctgggataggcctgggaagcatccacataaaaagctaaaggcccagataacaggaaaaacagacaatcatggcagcaatgccacccctctgtattgactagtgtctgcacattatgaagtgattatatagagaagatgttgacttgatgatgtggtgaacagagaatctccaaactgaagttaaggggaaagttaacctgttaagagacagactagccagaaacaaagcagaaaccccaggactccgttttcacctgctctttcatttgcactctgtgttaacctcagggcccggcgacggagtcctcagctccaagacattctgaggggcctcggacacccacattcccactggaaccggaggccacaggctttgccctaagctctccatcctctgcctgaggttacttccaactctggcagctttcccactaatttataagtccttcacttcaaagaaggaaaactatcttcagtttttaaattttttgtggagactgggtctcaccatgttgcccaggttggtcttgaactcctagccttaagtgatcctcccatctcggctcccaaagtggtgggattactggcatgagtcactgtgcccagacagggaaggaaagatagcttcagctttgactcttctctcagtgcctagcatagctttgaatatcctaagggcacaaccaatacctgggggaagtagcctagtgctgtgggctgttaataagctttggagtcaggtgcatctgggttggagcccagttctggggttatcaacctattgggcgacagagtgtgacaatgcatgtcatgcacgaggaacactggagaccctcataagtgcaggcacctcccttgataaagaaagaagtttttttgcaaatatcattgtcaatgctcgccaatggatgcaaaagcaattggacatgtactatttccttggtaaaaacacagggaaatctttgagaagaagagtccagtcacattggaagcaaatgagaaggaaagaatggtgctctctttttttaattggctggccattacatctttgctttcactttgagtgtctccaatgcaagttttcctttcttggagaatgtgctgtgctttgtgcacccaagatccagagagtctccgccagaggaatccggtctccccacaacaccacacattccattatctgtgacagttcacacccagatttactacctgtggatctaacagccataggagtctcagcaaagttaggaagcccttttatgttcccctctgatatacagcactggtgccacacaagacttcaataaagcttgcaagtatctaagcccacctggaagttattgacgaacccatgcagattactgcgcaggtctgcaataaaaatcctgtccaaatagaaaattcattttttttcctgaaaatgaaatgaagatatgatttaaagtatccttttctcatttcccagtactgaaagaataacaagctggccttccccggcaaacctcaagacttcacaataccattggaaggccaggaatgaactttggtaaaggatttattagaaagaataactttatgaacaatcattattttattagctatactccattaaatatatgggagttttaaaatttacaaagcacattctcatttattatctcatttgatcttcatccctattttacagatgagaaaactgaggctggaggaaattcagaggcttgttcatgcacacgtagctgatacatgcaagagctcaaactggaacctgggcagccgactccatgccagtgttctgtaggaggtggagttttgagcttctcaagaaccagaaatggagatagagagccaggcaaagttgatctgcctttctcaaaaaaacaaacactggctgggtgggggcacaatggctcaagcctgtaatcccagcactttgggaggccgaggcaggcggatcacttgaggtcaggagttcgagaccagcctggccaacatggtgaaatgccgtctctactaaaaacacaaaaattagccaggcatggtgacacgcgcctgtagtcccagctactctggaggctgaggcaggagaatcacctgaacccaggaggcggaggttgcagtgagctgaggttgtagcactatactccagcctgggtgacagagcgagactccgtctcaaaaaaaaaaaaaaaaagaaaaaagaaaaaaagaaaagaagaaaaaaacagtgacaatagattttatttcagtcagaagaattcaaggtgggggaaacaatagatttacttggtaccaattctttagggccaactctctcaaaatcaaaaagaacaactaagaaaaaaaacctgtactagttaaatgtagcttttcaaccaattcaagccatagatatctagtgaatggttatgtacaaaggctcaagtgttggcttcaaagtgcttacaatttagtagaagagataaaacaagaacttctgcatgtgcatgtgtgtatgcgtggaaggtgcagagagagcaatggggtgggggtaaggaggggacagatatgaaaggtttcttgcaggcgacagtgttgggctttgacattgaaggaggaaggaatcaataacaggatcacctattcaaaggtgttgccaaagcagacacaggggcaagctaacaccgatgaagagcgcctgtacataggacacactcgccactacgtgctcatttttattgtgaaaatagggaagaaacctcagatgagtttgttttttttttttaagtgttgccacattgagaggagaggagcagaactggtgagccagcagcctttgctggggtgagcaaaagaaacggggagacactggaggccagctcgtgtcccctgcccagggaggtgacttgctccaggctctgaatttcagctgctgctgcacctgctctgagacagtccagcactagatggtttgcacatcacttgctcctcacagtcacccttcacagaggtggagcagcagccaaaattcagagtgtaacatcttctcagccctcaagaccctgctctcctggtctagcctatggctgggaagtgaggagagatcctgggaacagcccccaccactgctacctctgcagcagggagggaggagctgaactgaaaaaatggacaggaggcaggctgggaaaattcccacatcttcagcccctgccggcgcctcccagagctccagagaggcaggcccaccttcatttatggaggctcccgaggtactacaataagaagaaatgccaaagcagggataccaaagttgtgatatgttttaaagtcttgcaacaaagaaacaaatgctctaataattcacatgcaatacaacataagtatgctaatcaaaagccaaattgaggctttacatataaatatccattaatgccacaacatacattagtgaaatggtttagcaacaggacccagattaaagatgtgtgatgagcactgttctctttcaattttgtcggcaatctcttggattgaatttacaaaaccttttggagataacagcagaagttgaaatttgaggccctttgcaaatgaaagtcatgggccaacatgattctaatgcttaactttcctccctccatcccactttcccccctccatcccactttccccacctccagacccaccaagcctccttgtcaaccctccagtctcacgcaggtgcccccccaccccaaatctcccctgtgattccaatcactggatcaacaaaaaacccctctcctgtccaggagcagggcctcctcctgctgagagaggaaggctgcaggctcttcggttactgctgcatagactggaaagactgacggagctgcctgcacagctaagtggcagaggccactctccaggcctgggctttcttttctttcttcctgcactcttcctccatccctccttgtgagtgcctggctccttgggaccctgtgcaaacactgttgttgttacaaatgtctaaaatcacttgacatttagtgtagcagagaccctgcaaggaactaactacatgctcagtggtggaatccactgcaccaaaagattagatggttccactgcctccctacaaatctctattgctttgcaaatgattagaagagaaaacaaatcaggctttttccagatgcccccaaaagacagtcagtcaaagggtgtatcattcaccggaacacatgcctgcaaccaagacaacatctgggcaagcagagattaatattatattaattcactcattcaaccattcactccacaaacatccactgcctgccgcttgagtcaggtactgagctaggtgtcaggtacacagctatgaataggacatggtcttttctttcaccatcagacgatgaagtaggtgaacataactagggacaaggagagagctgagtaaacactaccctggggtctcaccgtgttgcaggtatccggcttagtgtgaacctgtcactcagggccaaggcgtcagcgctcctctccctatccactcttccttccttgaattctgccctcttctatcctctgcttcacttttcctcccatcttcctgtcctcttctcctcctaccctcaagctctgggtaaacataaaaagcacacacattcttatgcctcaggctcccccagccctcaaaagctgtcatccttcatgcaaatgcctgctttacacatgctttgcaatgtatttccattccaaccttcaaaagcagggggacttatcagtaaatatcataaacgctggatttttttaagctgcagctacaacagcaagtggctgacaaggttggctctgcacatgcacagcactgaatgaagccccatgagaagcaggcattgttagagctccagagtgtagctcagttccctgcgtcgaggtggcttctatctgtgtcagtcagtgcgtcacaacaccagcctcctccaccccccgcacacagcaccccttagcaagcaccttcccacacaatatcatcaactgtaaaaactgcaaccatcgccaaagttacaaccatggttatttctacaaacgggagggatgcggttctgctcagtcagtccctggtaagtaggttacccgcgggacaaacacctttcctttgagttaattcagaatgcccttggctcagctatccatccacacaagaggccaatgtcctggagtaacatgtttgtctgcatgtatggaattccttctgcatgctggtataagaaacggaaactgggtccacacactctgtagtctgtgtgagcagctgtaaagtcctcagctgcctgattttaatacatttcaccttgaaaaattatctccttcatgaaaaatggcttagttagacttcaccttatatgaacctttgagttagccctaggccctctgcctcaccaggccccttgtaagctttcttcaaatgctcctttctgcactgcctccctcacctttccctctagagctttccacctgcttgtgattttcaattttgctataaattttaactctattctctgagatgaccctcaagaccatcccaatggctgagaaaactcacagcccttacaaaatacgaacaaagcatccctacatcccaccccataccatctcccctgcacccaaagaatcagtcctaagagtatgcgtcactgctatcactttaaatgaaaattttcttatcattatattaatcatagcacccaggatactgcataaaataatgaaaatctgaatggaagatttttgaatgctactgacgcagtatgctgcgaccggctagtaaaacaagataacaccatttggggggaggaatatattaaatattatcatctaccaccaaaagaaaaaaaaagaaatgaggtttactacaaatgtaaagattaagagcaaagaagcaaaaagaatattgaaatcaccgctttcacatgtgtgtattatacatatttggaattcagagttatattaaagggaattttcacagaatggaaaagaatcacaggagagggggtgggagagggttttttgactattttcaaaaaatgatatatggtgtcgggagtgtcaaggaggaaggctgcgagagagaggtggatgagaacactgagtgagcagctcggagaggagcgccttggcttccaaagcaggaggcaggaatggaaacacagagcactccttcccgagaagaagttcacattcacgccaagaaagtgggtgagcatcgcagcgtagagccagacttcccctgcctgactcacaagacgggctctggtattttagaccccagcagagggacctgcggagattctctctcggtggcaccaacccaaactctgattcatcatcggtttgaaaaaggccccttttcggtcctctaaaggggtggtgcctttgtgaaactactatttacacacaagatggcaatccctcaagggaggtggggacgtcagtttctgaagggtacaggaaagcctagagagtgttggttacttcctttgaaatcagagagcatctctaggaagaggatggatgttggtctgctgaccaactgtcaaggggtgtgtgacccacagacagcctgctccccaacactctgctgtcagctgcaggctccaaacttctttctcggaatgagacagtttcagggaaagaaaacgtgtttccttctcaaccaaggccagagcctctccctggaagcctgaggggccccactccttgctggggagccgtgcaggctgggccccacatcgacttcttcgggtgaaaatagctctcctgaatccagagttcagcatctccgattcccagaattacacccacgtactcttggcctcctccgtggctctaaggtgccctgacttctgtcaccgtcctttcaccatcaaaggtgtttctgacctaaggtgcttctcaaggtgctttgatcaggggtaagaggaccccagaccccaaaagggctaaaaacagcaacagttgcccctggaggtctgggtctttgcgggcctattttgtctcggcaccccgacacagaaatacccgggatgtctgcccatgggcagagctggtctctgaccaggcctttgggccaggctggagcacccgtgcctggcttccaaaggaacttcccctccctggcatggatggctcatcttgagtgacctgagcataagatgttgcaaataccccgggtagaggagaaggcgccttcttttctgctaccagatccggagggtcaggaaaggtgctccctgagaagggtcaaggaagggcaggagcccgactctcgttcagagacacctgggaaagacgctctcttcgtcagagtgggtcacctagggagaagccgggcagagctgcccccccccggcccgctccccggagcctgcagccgcgtttacccaaaccagctctcctggaaagccagcgggtgcggcgcgcccgagcagggcagcccaccacccgcagccggcagccaaggccgggaaagttggtcctagagcagcgcgggcctgccgggtgctgtccaaggtgctgaaaggtctctgcgggcagctggcgggaggattctgcgcgccctcagcctcccggccacccgctctgcccttccagcctgccgccctgtccccttcccggccgcgcagaagcctccgtccctcctctacgcccaccgagccttccccgctcgggtgccgccaactccgccgcaccgggcgccgcgccccaccgcgtcccgggccgcccgacccctgcccccagcagccacttgcaggtgccgcggtcgctgggctttcaccgccgccccctcctaccttcttctttcggtcacgggagcggtttctccgcttcctgttggattcctccttctccttctgctcctggagggcctgcgcctcgatgtctttgattttcttcagctgtttggccgcttgagccatggcgggtcacggcgctcccgtccccgcctcctggacccctagcgctcagcgatccccgaggcgacaccccctaagaaggggaagggggtctctgctccacagaggggacagcgttcgtggcgccccgagggccggctgctgcggggtcgcgggaaggcgaaggcagttccggacgcggagggcgaggggcggctgcccgcggcccgggatggcgctgccgccgcggccggagctcgcttgccggcgcccgggacgggctctgggcagggcccgccgcctccctccctccgcctccctccctctcctgcggcggcggcggcggcgaagcgggggggcgggggcggggaggcggctcgtactgcggcggcggcgggcggtgagcggccgcggaaggggcggattcgggcgctcagcgcgggaaggcccgggggcccggccggcgcggcgaggctgggcgcactgggcgtccgcacggggtcatggcgagcgccgagcttccgcctttgcagagccccgcgccgtcgggcggcgggaacaaagcggccgctctaccccggaccccgctgcgggccgcagggccaagccgggggaagaggggaggctgcggcgggcggcgcgccccgcgcccgggcgacccggcggaccagcgcgcctggcggcggcgagcgcggcgacatcgcgggagcggaggctcggcctagagggcgggcggcagagggcaaggaccgggcttggggagcccccgggcggtggccgctgagggcccggacgcgctactcccgagcccggggtgcggttcctccccgggcgccctcggcgtggggcgcgcgcctccggggctccctggggaagagccggttccccgcgccgcacgctgggagcttgatttgcccctttcagaccatgtgggcctttcatttgcatatttccgaattatagatgaaaacgtatccaggatcaagtgaattgttttcctttgagtcctcttgggacagaaaaggaagtaggtccccgctccagccccgcccgtcccccatccccggcgctcccgcgcacgcctccctggggacgccgcctgcgcccgtgccccgcggggaagagctgcacttgggtccgcagcgccagcccagcctgcggcaggcggagggggcctagggctcagccaaccaccccgtcacgccgcacaggagccagccggggtccccggctcgggagctgccgcccacccactccctctccatcccgtgggacgagcacttcttccacaaacggctaaggagggagttgtgaaaaacaatatttgagacttggagaagagttattatgaaatagtctgcctccttctgcctcccctaagctgagggcttgctgtagacatttacccagccaggctagagccgagaaaggaggcgtctaccaagctgcagagaacgacgtcctgggcctgcgagctgggccccacgcagtgcaaacttgggagcaactgggccttgcctctaaccccctgcagcctgcaagcgctgcctcacaggacctccccccgccgccccccccaaccctgtctttgcccttccatccccctctccacctgcactcctctggcaaaagccttgttttgaagacgatttcccagggctgggtccttgactgaggtctcactctagacgcagtgcgagccacaaattccaattccatatggaatttaaatttgcaagtagccatatctttagaaaaaaaaactggtaaaattaattttaataatatattttaattcaatatatt
